(19) United States
(12) Patent Application Publication
(10) Pub. No.: US 2020/0354419 A1
(43) Pub. Date: Nov. 12, 2020

(54) COMPOSITIONS AND METHODS OF USE THEREOF FOR THE TREATMENT OF DUCHENNE MUSCULAR DYSTROPHY

(71) Applicant: HUNTERIAN MEDICINE LLC, Cambridge, MA (US)

(72) Inventor: Vinod Jaskula-Ranga, Cambridge, MA (US)

(21) Appl. No.: 16/761,112

(22) PCT Filed: Nov. 2, 2018
(86) PCT No.: PCT/US18/59074

§ 371 Date: May 1, 2020

Related U.S. Application Data
(60) Provisional application No. 62/581,493, filed on Nov. 3, 2017.

(51) Int. Cl. C07K 14/47; C12N 15/113; A61K 48/00; C12N 15/86

(52) U.S. Cl. CPC C07K 14/4708; C12N 15/113; A61K 48/005; A61K 38/00; C12N 2310/20; C12N 2310/33; C12N 2750/14143; C12N 15/86

(57) ABSTRACT

The present disclosure provides, in part, a method of treating subjects with Duchenne muscular dystrophy (DMD) via gene editing approaches that induce exon deletion(s) to restore the reading frame of the dystrophin gene, thereby restoring dystrophin protein activity. The invention also provides compositions comprising adeno-associated viral vectors, an RNA-guided nucleases, nickases or DNA endonucleases, and guide RNAs for use in the treatment of subjects with DMD, or subjects with other neuromuscular genetic diseases or disorders.

### CROSS-REFERENCE TO RELATED APPLICATIONS

[0001] This application claims the benefit of U.S. Provisional Patent Application No. 62/581,493, filed Nov. 3, 2017, the entire contents of which are incorporated by reference herein.

### FIELD OF THE INVENTION

[0002] The present disclosure relates to the fields of molecular biology, medicine and genetics. In particular, the present disclosure provides therapeutic compositions and their use in genome editing based methods for the treatment of Duchenne muscular dystrophy and other genetic diseases or disorders.

### BACKGROUND OF THE INVENTION

[0003] Duchenne muscular dystrophy (DMD) is an X-linked neuromuscular disorder and is the most frequent lethal heritable childhood disease: DMD affects approximately 1 in 3500 to 5000 boys. DMD is a severe disease, characterized by progressive muscle weakness that leads to DMD patients being confined to wheelchairs by the age of 12, and ultimately death at around age 25.

[0004] DMD is caused by a wide variety of mutations in the gene encoding dystrophin at locus Xp21, located on the short arm of the X chromosome. The dystrophin gene product is a large intracellular protein that links the dystroglycan complex at the cell surface with the underlying cytoskeleton. As such, dystrophin protein maintains the integrity of muscle cell membranes during contraction. With 79 exons, the dystrophin gene is one of the largest protein encoding genes in the human genome, and this size makes the dystrophin gene prone to alterations such as deletions and duplications. Frame disrupting alterations to the dystrophin gene result in premature stop codons, and subsequently lead to a truncated protein. Truncated dystrophin proteins cannot provide the structural support necessary to withstand the stress of muscle contraction. This leads to muscle fiber damage and membrane leakage that ultimately manifest as the muscle wasting, breathing complications, and cardiomyopathy that are symptomatic of DMD.

[0005] Many different therapeutic strategies for DMD have been explored over the years but existing approved treatments are palliative at best. Beta-2 adrenergic receptor agonists are sometimes used to increase muscle strength, but they do not modify disease progression. A common treatment for DMD is the use of steroids (e.g., prednisone and deflazacort) that have been found to be effective in slowing the course of muscle loss. However, such treatment can lead to side effects such as delayed onset of puberty. Also, rapid withdrawal of corticosteroids can result in life-threatening complications. Additionally, several gene- and cell-based therapies have been developed that aim to deliver functional dystrophin genes or proteins to diseased muscle tissue. However, these approaches have been challenged by the large size of the dystrophin gene, low efficiency, limited persistence of transgene expression, and the host immune response to the vectors used to package the dystrophin gene or protein. As such, no curative treatment for DMD currently exists.

[0006] Accordingly, there is a clear, on-going, and urgent need to develop new approaches for the treatment of DMD that provide lifelong restoration of dystrophin expression and activity in the various muscles of the body, in order to improve patient quality of life and to reduce DMD associated morbidity. Recent advances in genome editing technologies, to correct a gene carrying a harmful mutation for example, have sparked enthusiasm and hope for the development of such novel therapeutic strategies for DMD, as well as other genetic diseases, disorders or conditions. Thus, the present disclosure provides genome editing methods, and compositions for use in such methods, for the treatment of DMD and other genetic muscular, neurological, or other diseases, disorders or conditions.

### SUMMARY OF THE INVENTION

[0007] The present disclosure presents a genome engineering approach to address the genetic basis of DMD, as well as other genetic diseases, disorders or conditions. The present disclosure provides gene editing methods to create changes to the genome of such patients that can restore the reading frame and the protein activity of mutated genes, thereby effecting permanent corrections to the underlying genetic defect causing the disease, disorder or condition.

[0008] Described herein in part is a method of treating a subject (e.g., a human) with Duchenne muscular dystrophy (DMD), comprising administering to the subject a composition comprising an adeno-associated viral vector, an RNA-guided nuclease or nickase or a DNA endonuclease, and at least one dystrophin-targeted guide RNA in amount sufficient to delete a skippable exon encoding the dystrophin gene, wherein the subject with DMD has a mutation causing a frameshift in the dystrophin gene and wherein the deletion of the skippable exon prevents the frameshift. In some embodiments, preventing the frameshift in the dystrophin gene results in partial or complete restoration of dystrophin protein activity.

[0009] In some embodiments, the DNA endonuclease is a Cas9 endonuclease or a Cpf1 endonuclease. In some embodiments, the composition comprises two dystrophin-targeted guide RNAs that recognize different DNA sequences.

[0010] In some embodiments, the skippable exon is selected from the group consisting of exon 2, exon 8, exon 17, exon 43, exon 44, exon 45, exon 46, exon 50, exon 51, exon 52, exon 53, and exon 55 of the dystrophin gene. In some embodiments, the skippable exon is selected based on the deleted exon or deleted exons that specifically occur in the dystrophin gene of the subject. For example, in some embodiments, the skippable exon is selected from the list in Table 1 according to the indicated dystrophin exon deletions.

[0011] The mutation may be a deletion, an insertion, a duplication, or a translocation. In some embodiments, the mutation is a deletion of exons 3-7, 3-19, 3-21, 4-7, 5-7, 6-7, 12-16, 18-33, 18-41, 18-44, 44, 44-47, 44-49, 44-51, 14-43, 19-43, 30-43, 35-43, 36-43, 40-43, 42-43, 45, 45-54, 12-44, 18-44, 46-47, 46-48, 46-49, 46-51, 46-53, 46-55, 21-45, 47-54, 47-56, 51, 51-53, 51-55, 45-50, 47-50, 48-50, 49-50, 50, 52, 52-63, 53, 53-55, 10-52, 45-52, 46-52, 47-52, 48-52, 49-52, 50-52, 45-54, or 48-54 of the dystrophin gene.

[0012] Also provided herein is a method of treating a subject (e.g., a human) with Duchenne muscular dystrophy (DMD), comprising administering to the subject a composition comprising an adeno-associated viral vector, an RNA-guided nuclease or nickase or a DNA endonuclease, and at least one dystrophin targeted guide RNA in amount sufficient to restore the reading frame of the dystrophin gene in the subject wherein the dystrophin targeted guide RNA recognizes a target site in the dystrophin gene selected from the sequences identified in Table 2. In some embodiments, one or more target sites recognized by the at least one dystrophin targeted guide RNA occur in an intron of the dystrophin gene.

[0013] In some embodiments, the DNA endonuclease is a Cas9 endonuclease or a Cpf1 endonuclease. In some embodiments, the composition comprises two dystrophin-targeted guide RNAs that recognize different target sites.

[0014] In some embodiments, restoring the reading frame of the dystrophin gene results in partial or complete restoration of dystrophin protein activity.

[0015] The present disclosure also contemplates a method of treating a subject (e.g., a human) with a genetic disease or disorder, comprising a gene editing strategy comprising administering to the subject a composition comprising an adeno-associated viral vector, an RNA-guided nuclease or nickase or a DNA endonuclease, at least one guide RNA, and optionally a donor DNA template in an amount sufficient (i) to delete a skippable exon encoding a mutated gene, wherein such deletion prevents a frameshift of the mutated gene; or (ii) to correct the DNA sequence of the mutated gene via homology directed repair (HDR), wherein the mutated gene is associated with the cause of the disease or disorder; and wherein said method of treatment reduces at least one symptom associated with the disease or disorder. The donor DNA template may comprise a correct DNA sequence (e.g., a wild type or non-mutated sequence) for insertion in the mutated gene via a homology directed repair mechanism.

[0016] In some embodiments, the DNA endonuclease is a Cas9 endonuclease or a Cpf1 endonuclease. In some embodiments, the composition comprises two guide RNAs that recognize different target sites. In some embodiments, the guide RNA(s) recognizes a target site in a gene selected from the group consisting of MYH7, TNNT2, TPM1, MYBPC3, PRKAG2, TNNI3, MYL3, TNN, MYL2, ACTC1, CSRP3, TNNC1, MYH6, VCL, MYOZ2, JPH2, PLN, CALR3, NEXN, MYPN, ACTN2, LDB3, TCAP, FLNC, SOD1, C9ORF72, and RYR.

[0017] In some embodiments, the genetic disease or disorder can be a muscle-related disease or disorder selected from the group consisting of Hypertrophic cardiomyopathy (HCM or CMH), amyotrophic lateral sclerosis, Becker's muscular dystrophy, central core disease, centronuclear myopathy (including myotubular myopathy), Charcot-Marie-Tooth disease, congenital muscular dystrophy, congenital myasthenic syndrome, Dejerine-Sottas disease, dermatomyositis, Duchenne muscular dystrophy, Emery-Dreifuss muscular dystrophy, facioscapulohumeral muscular dystrophy, Friedreich's ataxia, hyperthyroid myopathy, hypothyroid myopathy, inclusion body myositis, Lambert-Eaton myasthenic syndrome, Limb-girdle muscular dystrophy, mitochondrial myopathy, myasthenia gravis, myotonia congenita (including Thomsen's disease and Becker disease), nemaline myopathy, paramyotonia congenita, periodic paralysis (including hypokalemic and hyperkalemic), polymyositis, spinal and bulbar muscular atrophy, and spinal muscular atrophy.

[0018] In some embodiments the disease or disorder is suitable for treatment by an exon skipping therapeutic strategy. For example, in some embodiments, the subject to be treated has a disease or disorder selected from the group comprising Ataxia-telangiectasia, congenital disorder of glycosylation, fronto-temporal dementia and parkinsonism linked to chromosome 17, Niemann-Pick disease type C, neurofibromatosis type 1, neurofibromatosis type 2, megalencephalic leukoencephalopathy with subcortical cysts type 1, Pelizaeus-Merzbacher disease, familial dysautonomia, Marfan syndrome, and Loeys-Dietz syndrome.

[0019] Other objects, features and advantages of the present disclosure will become apparent from the following detailed description. It should be understood, however, that the detailed description and the specific examples, while indicating specific embodiments of the disclosure, are given by way of illustration only, since various changes and modifications within the spirit and scope of the disclosure will become apparent to those skilled in the art from this detailed description.

### BRIEF DESCRIPTION OF THE DRAWINGS

[0020] FIG. 1 is a schematic representation of the exonic structure of the human dystrophin gene. The dystrophin gene is the largest know protein coding human gene with 79 exons encoded by over 2 million base pairs.

[0021] FIGS. 2A-2D are schematic representations of frame shifting alterations in the human dystrophin gene and various genome editing strategies employed to correct them. FIG. 2A is a schematic representation of a frameshifting deletion of exon 50 within the dystrophin gene that results in a premature stop codon leading to a truncated and defective dystrophin protein. FIG. 2B depicts a single exon skipping strategy to correct the frameshifting alteration from FIG. 2A. Skipping of exon 51 by direct splicing of exon 49 to exon 52 prevents the frameshift and restores the reading frame of the dystrophin gene. FIG. 2C depicts a multiple exon skipping strategy to correct the frameshifting alteration from FIG. 2A. Skipping of exons 51-53 by direct splicing of exon 49 to exon 54 prevents the frameshift and restores the reading frame of the dystrophin gene. FIG. 2D depicts a repair strategy to correct the frameshifting alteration from FIG. 2A. A template with the correct wild type DNA sequence can be used to insert a correct copy of exon 50 through homology directed repair. This strategy will prevent the frameshift and lead to a functional, full length dystrophin protein product.

[0022] FIGS. 3A-3C are schematic representations of frame shifting alterations in the human dystrophin gene and various genome editing strategies employed to correct them. FIG. 3A is a schematic representation of a duplication of exon 2 of the dystrophin gene that results in a premature stop codon leading to a truncated and defective dystrophin protein. FIG. 3B shows an exon skipping strategy to correct the frameshifting alteration from FIG. 3A. The extra copy of exon 2 is skipped to prevent the frameshifting alteration. FIG. 3C shows an exon removal strategy in which the extra copy of exon 2 is deleted to prevent the frameshifting alteration from FIG. 3A.

[0023] FIG. 4 depicts a gene editing strategy to correct an R1667C mutation of the Ryr1 gene that occurs in central core disease. FIG. 4A is a genome browser view of a portion of the sequence of exon 34 of the human Ryr1 gene in which a C to T mutation effects a R1667C missense mutation. hs059742637 (5′-AGTGGAAGCGCTGCAGGTCCAGG-3′ (SEQ ID NO: 1) and hs059742644 (5′-CGCCCTGGGCAACAATCGCGTGG-3′ (SEQ ID NO: 2)) correspond to guide RNA sequences that direct the SpCas9 nickase to induce single strand breaks at DNA sites complementary to the guide RNA sequence. FIG. 4B depicts the overall strategy: a composition comprising an adeno-associated viral vector expressing the 2 guide RNAs and the SpCas9 nickase in combination with a second adeno-associated viral vector expressing a donor DNA template with the correct exon 34 sequence is used to mediate homology directed repair and correct the mutated Ryr1 gene.

[0024] FIG. 5 depicts a gene editing strategy to correct an T4709M mutation of the Ryr1 gene that occurs in central core disease. FIG. 5A is a genome browser view of a portion of the sequence of exon 96 of the human Ryr1 gene in which a C to T mutation effects a T4709M missense mutation. hs059750155 (5′-CTGGTGCTCAACACGCCGTAAGG-3′ (SEQ ID NO: 3)) and hs059750156 (5′-ACGGCGTGTTGAGCACCAGTCGG-3′ (SEQ ID NO: 4)) are exemplary guide RNA sequences that direct the SpCas9 nuclease to induce double strand breaks at DNA sites complementary to the guide RNA sequence. Either guide RNA can be used. FIG. 5B depicts the overall strategy: a composition comprising an adeno-associated viral vector expressing the guide RNA (e.g., hs059750155 or hs059750156) and the SpCas9 nuclease in combination with a second adeno-associated viral vector expressing a donor DNA template with the correct exon 96 sequence is used to mediate homology directed repair and correct the mutated Ryr1 gene.

[0025] FIG. 6A depicts a gene editing strategy to maintain the correct coding frame for nonsense mutations in exon 51 of DMD. The two targeting guide RNAs are indicated (hs132637319) and hs132637262), along with amplifying PCR primers. The entire amplicon is ˜1,450 bp, and the expected deletion from both guide RNAs is ˜630 bp. This deletion, resulting in exon-skipping is expected to maintain coding frame for non-sense mutations.

[0026] FIG. 6B depicts a PCR analysis following transfection indicates the deleted product at the expected size. FIG. 6C depicts a sequencing analysis which confirmed the deleted product following targeting.

[0027] FIG. 7A depicts an Interference of CRISPR Edits (ICE) analysis indicating cutting of the mouse DMD gene and mutations around the expected site (dotted line) following infection. AAV was used to deliver Cpf1 and a single guide RNA in mouse N2a cells. The WT sequence is indicated. FIG. 7B depicts an ICE analysis indicating cutting of the mouse DMD gene and mutations around the expected site (dotted line) following infection. AAV was used to deliver Cpf1 and a two targeting guide RNAs in mouse N2a cells: one that targets WT sequence (indicated), and one that targets the mdx mutation, a point mutation in the mouse DMD gene. The WT sequence is indicated. FIG. 7C depicts an ICE analysis indicating cutting of the mouse DMD gene and mutations around the expected site (dotted line) following transfection of MAD7 nuclease. The WT sequence is indicated.

### DETAILED DESCRIPTION

[0028] The present disclosure is based in part, upon advancements in gene editing technology that have enhanced the ability to correct genetic defects in cells, thereby providing new avenues for treatment, as well as potential cures for genetic diseases or disorders. The present disclosure provides methods of treating subjects with genetic diseases or disorders through adeno-associated viral vector delivery of some CRIPSR systems (e.g., CRIPSR/Cas9 or CRIPSR/Cpf1) in order to edit the genomes of cells carrying defects in a mutated gene (e.g., dystrophin) to generate a precise corrective modification at the target locus, thereby restoring the activity of the mutated gene product. These and other aspects of the disclosure are set out in detail below.

### Definitions

[0029] The following definitions are included for the purpose of understanding the present subject matter and for constructing the appended patent claims.

[0030] Throughout the application, where compositions are described as having, including, or comprising specific components, or where processes are described as having, including, or comprising specific process steps, it is contemplated that compositions of the present teachings also consist essentially of, or consist of, the recited components, and that the processes of the present teachings also consist essentially of, or consist of, the recited process steps.

[0031] In the application, where an element or component is said to be included in and/or selected from a list of recited elements or components, it should be understood that the element or component can be any one of the recited elements or components, or the element or component can be selected from a group consisting of two or more of the recited elements or components. Further, it should be understood that elements and/or features of a composition, an apparatus, or a method described herein can be combined in a variety of ways without departing from the spirit and scope of the present teachings, whether explicit or implicit herein.

[0032] It should be understood that the expression “at least one of” includes individually each of the recited objects after the expression and the various combinations of two or more of the recited objects unless otherwise understood from the context and use.

[0033] The use of the term “include,” “includes,” “including,” “have,” “has,” “having,” “contain,” “contains,” or “containing,” including grammatical equivalents thereof, should be understood generally as open-ended and non-limiting, for example, not excluding additional unrecited elements or steps, unless otherwise specifically stated or understood from the context.

[0034] The use of the singular herein, for example, “a,” “an,” or “the,” includes the plural (and vice versa) unless specifically stated otherwise.

[0035] It should be understood that the order of steps or order for performing certain actions is immaterial so long as the present teachings remain operable. Moreover, two or more steps or actions can be conducted simultaneously.

[0036] At various places in the present specification, values are disclosed in groups or in ranges. It is specifically intended that the description include each and every individual subcombination of the members of such groups and ranges and any combination of the various endpoints of such groups or ranges. For example, an integer in the range of 0 to 40 is specifically intended to individually disclose 0, 1, 2, 3, 4, 5, 6, 7, 8, 9, 10, 11, 12, 13, 14, 15, 16, 17, 18, 19, 20, 21, 22, 23, 24, 25, 26, 27, 28, 29, 30, 31, 32, 33, 34, 35, 36, 37, 38, 39, and 40, and an integer in the range of 1 to 20 is specifically intended to individually disclose 1, 2, 3, 4, 5, 6, 7, 8, 9, 10, 11, 12, 13, 14, 15, 16, 17, 18, 19, and 20.

[0037] The use of any and all examples, or exemplary language herein, for example, “such as,” “including,” or “for example,” is intended merely to better illustrate the present teachings and does not pose a limitation on the scope of the invention unless claimed. No language in the specification should be construed as indicating any non-claimed element as essential to the practice of the present teachings.

[0038] As used herein, the term “effective amount” or “amount sufficient” refers to the amount of a therapeutic composition or therapy that is sufficient to result in the prevention of the development, recurrence, or onset of a disease or disorder and one or more symptoms thereof, to reduce the severity or duration of a disease or disorder, to ameliorate one or more symptoms of a disease or disorder, to prevent the advancement of a disease or disorder, to cause regression of a disease or disorder, and/or to enhance or improve the therapeutic effect(s) of another therapy. In an embodiment, the “effective amount” or “therapeutically effective amount” refers to the amount of a composition that is sufficient to effect beneficial or desired results. The therapeutically effective amount may vary depending upon one or more of: the subject and disease condition being treated, the weight and age of the subject, the severity of the disease condition, the manner of administration and the like, which can readily be determined by one of ordinary skill in the art. In a specific embodiment of the invention, a therapeutic composition in an “amount sufficient” refers to the amount of the composition needed to prevent, reduce, or alleviate at least one or more signs or symptoms of DMD, and relates to a sufficient amount of the composition to provide the desired effect, e.g., to treat a subject having DMD. The term “effective amount” therefore refers to an amount of a composition that is sufficient to promote a particular effect when administered to a typical subject, such as one who has or is at risk for DMD. An effective amount would also include an amount sufficient to delay the development of a symptom of the disease, alter the course of a symptom of the disease (for example but not limited to, slow the progression of a symptom of the disease), or reverse a symptom of the disease. It is understood that for any given case, an appropriate “effective amount” can be determined by one of ordinary skill in the art using routine experimentation.

[0039] The terms “subject” and “patient” are used interchangeably herein. The subject treated by the presently disclosed methods in their many embodiments is desirably a human subject, although it is to be understood that the methods described herein are effective with respect to all vertebrate species which are intended to be included in the term “subject.” Accordingly, a “subject” can include a human subject for medical purposes, such as for the treatment of an existing condition or disease or the prophylactic treatment for preventing the onset of a condition or disease, or an animal subject for medical, veterinary purposes, or developmental purposes. Suitable animal subjects include mammals including, but not limited to, primates, humans, monkeys, apes, and the like; bovines, e.g., cattle, oxen, and the like; ovines, sheep and the like; caprines, e.g., goats and the like; porcines, e.g., pigs, hogs, and the like; equines, e.g., horses, donkeys, zebras, and the like; felines, including wild and domestic cats; canines, including dogs; lagomorphs, including rabbits, hares, and the like; and rodents, including mice, rats, and the like. An animal may be a transgenic animal. In some embodiments, the subject is a human including, but not limited to, fetal, neonatal, infant, juvenile, and adult subjects. Further, a “subject” can include a patient afflicted with or suspected of being afflicted with a condition or disease.

[0040] As used herein, the terms “treat,” “treatment,” and “treating” in the context of the administration of a therapeutic composition to a subject refer to the reversing, reduction or inhibition of the progression and/or duration of the disease, preventing or reducing the likelihood of the disease, reduction or amelioration of the severity, and/or the amelioration of one or more symptoms of the disease, disorder, or condition to which such term applies resulting from the administration of one or more therapies. In some embodiments, the treatment reduces the amount of defective dystrophin protein in cells (e.g., muscle cells) of the subject. For example, the treatment can reduce the amount of defective dystrophin protein in cells (e.g., muscle cells) of the subject by at least 5%, 10%, 15%, 20%, 25%, 30%, 33%, 35%, 40%, 45%, 50%, 55%, 60%, 70%, 75%, 80%, 85%, 90%, 91%, 92%, 93%, 94%, 95%, 96%, 97%, 98%, 99% or more as compared to the amount of defective dystrophin in cells in a subject before undergoing treatment or in a subject who does not undergo treatment. In some embodiments, the treatment increases the amount of dystrophin protein activity in cells (e.g., muscle cells) of the subject. For example, the treatment can increase the amount of dystrophin protein activity in by at least 5%, 10%, 15%, 20%, 25%, 30%, 33%, 35%, 40%, 45%, 50%, 55%, 60%, 70%, 75%, 80%, 85%, 90%, 91%, 92%, 93%, 94%, 95%, 96%, 97%, 98%, 99% or more as compared to the amount of dystrophin protein activity in cells in a subject before undergoing treatment or in a subject who does not undergo treatment.

[0041] As used herein, the terms “manage,” “managing,” and “management” in the context of the administration of a therapy to a subject refer to the beneficial effects that a subject derives from a therapy (e.g., a prophylactic or therapeutic composition) or a combination of therapies, while not resulting in a cure of the disease or disorder. In certain embodiments, a subject is administered one or more therapies (e.g., one or more prophylactic or therapeutic compositions) to “manage” DMD so as to prevent the progression or worsening of the condition.

[0042] As used herein, the terms “prevent,” “preventing” and “prevention” in the context of the administration of a therapy to a subject refer to the prevention or inhibition of the recurrence, onset, and/or development of a disease or disorder, or a symptom thereof in a subject resulting from the administration of a therapy (e.g., a prophylactic or therapeutic composition), or a combination of therapies (e.g., a combination of prophylactic or therapeutic compositions). In some embodiments, such terms refer to one, two, three, or more results following the administration of one or more therapies: (1) a delay in the development of a symptom of the disease, (2) an alteration of the course of a symptom of the disease (for example but not limited to, slowing the progression of a symptom of the disease), and (3) a reverse of a symptom of the disease. In some embodiments, such terms refer to a reduction in mortality and/or an increase in survival rate of a patient population. In further embodiments, such terms refer to an increase or enhancement in the quality of life of a patient population. In some embodiments, such terms refer to a decrease in hospitalization rate of a patient population and/or a decrease in hospitalization length for a patient population.

[0043] As used herein, the terms “therapies” and “therapy” can refer to any method(s), composition(s), and/or agent(s) that can be used in the prevention, treatment and/or management of a disease, disorder or condition, or one or more symptoms thereof. In certain embodiments, the terms “therapy” and “therapies” refer to steroid therapy, physical therapy, gene therapy, chemotherapy, small molecule therapy, radioimmunotherapy, toxin therapy, prodrug-activating enzyme therapy, biologic therapy, antibody therapy, surgical therapy, hormone therapy, immunotherapy, anti-angiogenic therapy, targeted therapy, epigenetic therapy, demethylation therapy, histone deacetylase inhibitor therapy, differentiation therapy, radiation therapy, or a combination of the foregoing and/or other therapies useful in the prevention, management and/or treatment of a disease, disorder or condition, or one or more symptoms thereof.

[0044] As used herein, the terms “administering” and “administered” refer to the delivery of a composition into a subject by a method or route that results in at least partial localization of the composition at a desired site. A composition can be administered by any appropriate route that results in effective treatment in the subject, i.e. administration results in delivery to a desired location in the subject where at least a portion of the composition is delivered to the desired site for a period of time. Modes of administration include injection, infusion, instillation, or ingestion. “Injection” includes, without limitation, intravenous, intramuscular, intraarterial, intrathecal, intraventricular, intracapsular, intraorbital, intracardiac, intradermal, intraperitoneal, transtracheal, subcutaneous, subcuticular, intraarticular, sub capsular, subarachnoid, intraspinal, intracerebro spinal, and intrasternal injection and infusion. In some examples, the route is intravenous.

### Methods of Treatment

[0045] In one aspect, the present disclosure provides a method for treating a subject (e.g., a human) with Duchenne muscular dystrophy (DMD) By using gene editing tools to create permanent changes to the genome that can restore the dystrophin reading frame and restore the dystrophin protein activity, the resulting therapy can correct the underlying genetic defect causing the disease. In some embodiments, the present disclosure provides a method of treating a subject with Duchenne muscular dystrophy (DMD), comprising administering to the subject a composition comprising an adeno-associated viral vector, an RNA-guided nuclease or nickase or a DNA endonuclease, and at least one dystrophin-targeted guide RNA in amount sufficient to delete a skippable exon encoding the dystrophin gene, wherein the subject with DMD has a mutation causing a frameshift in the dystrophin gene and wherein the deletion of the skippable exon prevents the frameshift.

[0046] In some embodiments, preventing the frameshift in the dystrophin gene results in partial or complete restoration of dystrophin protein activity. In some embodiments, preventing the frameshift in the dystrophin gene results in partial restoration of dystrophin protein activity. For example, in some embodiments, preventing the frameshift in the dystrophin gene increases the amount of dystrophin protein activity in the subject's cells (e.g., muscle cells). For example, the amount of dystrophin protein activity in the subject's cells (e.g., muscle cells) increases by at least 5%, 10%, 15%, 20%, 25%, 30%, 33%, 35%, 40%, 45%, 50%, 55%, 60%, 70%, 75%, 80%, 85%, 90%, 91%, 92%, 93%, 94%, 95%, 96%, 97%, 98%, 99% or more as compared to the amount of dystrophin protein activity in such cells in a subject before undergoing treatment or in a subject who does not undergo treatment. In some embodiments, preventing the frameshift in the dystrophin gene results in complete restoration of dystrophin protein activity.

[0047] In some embodiments, the DNA endonuclease is a Cas9 endonuclease or a Cpf1 endonuclease. For example, in some embodiments, the DNA endonuclease is a Cas9 endonuclease. In another embodiment, the DNA endonuclease is a Cpf1 endonuclease.

[0048] In some embodiments, the composition comprises at least one (e.g., 1, 2, 3, 4, 5 or more) dystrophin-targeted guide RNA. In some embodiments, the composition comprises one dystrophin-targeted guide RNA. In some embodiments, the composition comprises two dystrophin-targeted guide RNAs. In some embodiments, the composition comprises more than two dystrophin-targeted guide RNAs. In some embodiments, the dystrophin-targeted guide RNAs recognize different DNA sequences (also referred to as target sites). For example, in some embodiments, the composition comprises two dystrophin-targeted guide RNAs that recognize different target sites. The target site(s) recognized by the at least one dystrophin targeted guide RNA may occur in an intron and/or exon of the dystrophin gene. In some embodiments for example, the target site(s) recognized by the at least one dystrophin targeted guide RNA may occur in an intron of the dystrophin gene. In some embodiments, the composition comprises two dystrophin-targeted guide RNAs that recognize different intronic target sites. In some embodiments, the composition comprises two dystrophin-targeted guide RNAs wherein at least one guide RNA recognizes an intron target site.

[0049] Exon skipping is a strategy in which sections of genes are “skipped” during pre-mRNA splicing, to enlarge a deletion so that it becomes its nearest in-frame counterpart. In the case of DMD, this allows for the creation of a partially deleted but functional dystrophin protein (van Deutekom J, 2003). The exon skipping approach has been employed through the use of antisense oligonucleotide (AON) to modulate splicing by hiding specific sites essential for exon inclusion from the splicing machinery. However AON-mediated exon skipping has met limited success because it suffers from inefficiency of oligonucleotide tissue uptake, requirement for lifelong delivery of oligonucleotides and incomplete exon skipping. The present disclosure circumvents this challenge by providing methods that use the CRISPR systems (e.g., CRISPR/Cas9 or CRISPR/Cpf1) to destroy exon splice sites preceding DMD mutations or to delete mutant or out-of-frame exons, thereby allowing splicing between surrounding exons to recreate an in-frame dystrophin protein that lacks the mutations.

[0050] In some embodiments, the disclosed method comprises deletion of one or more (e.g., 1, 2, 3, 4, 5, 6, 7, 8, 9, 10 or more) of any of the 79 exons in the dystrophin gene. For example, in some embodiments, the disclosed method comprises deletion of one exon (for example, refer to FIG. 2B) in the dystrophin gene. In some embodiments, for example, the disclosed method comprises deletion of two exons in the dystrophin gene. In some embodiments, for example, the disclosed method comprises deletion of three exons in the dystrophin gene (for example, refer to FIG. 2C). In some embodiments, for example, the disclosed method comprises deletion of more than three of any of the 79 exons in the dystrophin gene.

[0051] Assessment of the range of mutations that cause DMD shows that the skipping of any exon could be an effective therapy for many different DMD causing mutations in the dystrophin gene. It is estimated that the skipping of only 12 different exons could theoretically correct approximately 75% of DMD causing mutations (van Deutekom J, 2003). Accordingly, in some embodiments, the disclosed method comprises deletion of one or more (e.g., 1, 2, 3, 4, 5, 6, 7, 8, 9, 10, 11 or 12) skippable dystrophin exons selected from the group consisting of exon 2, exon 8, exon 17, exon 43, exon 44, exon 45, exon 46, exon 50, exon 51, exon 52, exon 53, and exon 55. For example, in some embodiments, the disclosed method comprises deletion of one skippable dystrophin exon selected from the group consisting of exon 2, exon 8, exon 17, exon 43, exon 44, exon 45, exon 46, exon 50, exon 51, exon 52, exon 53, and exon 55. In some embodiments, the disclosed method comprises deletion of two skippable dystrophin exons selected from the group consisting of exon 2, exon 8, exon 17, exon 43, exon 44, exon 45, exon 46, exon 50, exon 51, exon 52, exon 53, and exon 55. In some embodiments, the disclosed method comprises deletion of three skippable dystrophin exons selected from the group consisting of exon 2, exon 8, exon 17, exon 43, exon 44, exon 45, exon 46, exon 50, exon 51, exon 52, exon 53, and exon 55. In some embodiments, the disclosed method comprises deletion of more than three skippable dystrophin exons selected from the group consisting of exon 2, exon 8, exon 17, exon 43, exon 44, exon 45, exon 46, exon 50, exon 51, exon 52, exon 53, and exon 55.

[0052] In some embodiments, the skippable exon in the dystrophin gene is selected from the list in Table 1, based on the deleted exon or deleted exons that specifically occur in the dystrophin gene of the subject.

TABLE 1
Therapeutic exon skipping strategies for DMD deletions

| Skippable | Dystrophin |
|---|---|
| Exon | exon deletions |
| exon 2 | 3-7, 3-19, 3-21 |
| exon 8 | 3-7, 4-7, 5-7, 6-7 |
| exon 17 | 12-16, 18-33, 18-41, 18-44 |
| exon 43 | 44, 44-47, 44-49, 44-51 |
| exon 44 | 14-43, 19-43, 30-43, 35-43, 36-43, 40-43, 42-43, 45, 45-54 |
| exon 45 | 12-44, 18-44, 44, 46-47, 46-48, 46-49, 46-51, 46-53, 46-55 |
| exon 46 | 21-45, 45, 47-54, 47-56 |
| exon 50 | 51, 51-53, 51-55 |
| exon 51 | 45-50, 47-50, 48-50, 49-50, 50, 52, 52-63 |
| exon 52 | 51, 53, 53-55 |
| exon 53 | 10-52, 45-52, 46-52, 47-52, 48-52, 49-52, 50-52, 52 |
| exon 55 | 45-54, 48-54 |

[0053] In some embodiments, the present disclosure provides a method of treating a subject (e.g., a human) with Duchenne muscular dystrophy (DMD), wherein the subject has a mutation that causes a frameshift in the dystrophin gene. There are a variety of frameshifting mutations that occur in dystrophin gene which are known to cause DMD. Non-limiting examples of such mutations in the dystrophin gene include a deletion, an insertion, a duplication, or a translocation. The most prevalent cause of DMD is deletions of one or more exons; approximately 60-70% of DMD cases are caused by large deletions (van Deutekom J, 2003). In some embodiments, the subject with DMD (e.g., a human) has one or more of a deletion, an insertion, a duplication, or a translocation in their dystrophin gene. For example, in some embodiments, the subject with DMD (e.g., a human) has a deletion and/or a duplication in the dystrophin gene. In a specific embodiment, the subject with DMD (e.g., a human) has a deletion in their dystrophin gene.

[0054] In some embodiments, the subject with DMD (e.g., a human) has a mutation (e.g., a deletion, an insertion, a duplication, or a translocation) in their dystrophin gene, wherein the mutation is in exons 3-7, 3-19, 3-21, 4-7, 5-7, 6-7, 12-16, 18-33, 18-41, 18-44, 44, 44-47, 44-49, 44-51, 14-43, 19-43, 30-43, 35-43, 36-43, 40-43, 42-43, 45, 45-54, 12-44, 18-44, 46-47, 46-48, 46-49, 46-51, 46-53, 46-55, 21-45, 47-54, 47-56, 51, 51-53, 51-55, 45-50, 47-50, 48-50, 49-50, 50, 52, 52-63, 53, 53-55, 10-52, 45-52, 46-52, 47-52, 48-52, 49-52, 50-52, 45-54, or 48-54. In some embodiments, the subject with DMD (e.g., a human) has a mutation in their dystrophin gene, wherein the mutation is a deletion of exons 3-7, 3-19, 3-21, 4-7, 5-7, 6-7, 12-16, 18-33, 18-41, 18-44, 44, 44-47, 44-49, 44-51, 14-43, 19-43, 30-43, 35-43, 36-43, 40-43, 42-43, 45, 45-54, 12-44, 18-44, 46-47, 46-48, 46-49, 46-51, 46-53, 46-55, 21-45, 47-54, 47-56, 51, 51-53, 51-55, 45-50, 47-50, 48-50, 49-50, 50, 52, 52-63, 53, 53-55, 10-52, 45-52, 46-52, 47-52, 48-52, 49-52, 50-52, 45-54, or 48-54.

[0055] In another aspect, the present disclosure provides a method of treating a subject (e.g., a human) with Duchenne muscular dystrophy (DMD), comprising administering to the subject a composition comprising an adeno-associated viral vector, an RNA-guided nuclease or nickase or a DNA endonuclease, and at least one dystrophin targeted guide RNA in amount sufficient to restore the reading frame of the dystrophin gene in the subject; wherein the dystrophin targeted guide RNA recognizes a target site in the dystrophin gene selected from the sequences identified in Table 2.

[0056] In some embodiments, restoration of the reading frame of the dystrophin gene results in partial or complete restoration of dystrophin protein activity. In some embodiments, restoration of the reading frame of the dystrophin gene results in partial restoration of dystrophin protein activity. For example, in some embodiments, restoration of the reading frame of the dystrophin gene increases the amount of dystrophin protein activity in the subject's cells (e.g., muscle cells). For example, the amount of dystrophin protein activity in the subject's cells (e.g., muscle cells) increases by at least 5%, 10%, 15%, 20%, 25%, 30%, 33%, 35%, 40%, 45%, 50%, 55%, 60%, 70%, 75%, 80%, 85%, 90%, 91%, 92%, 93%, 94%, 95%, 96%, 97%, 98%, 99% or more as compared to the amount of dystrophin protein activity in such cells in a subject before undergoing treatment or in a subject who does not undergo treatment. In some embodiments, restoration of the reading frame of the dystrophin gene results in complete restoration of dystrophin protein activity.

[0057] In some embodiments, the DNA endonuclease is a Cas9 endonuclease, a Cpf1 endonuclease, or a MAD7 endonuclease. For example, in some embodiments, the DNA endonuclease is a Cas9 endonuclease. In another embodiment, the DNA endonuclease is a Cpf1 endonuclease. In another embodiment, the DNA endonuclease is a MAD7 endonuclease.

[0058] In some embodiments, the composition comprises at least one (e.g., 1, 2, 3, 4, 5 or more) dystrophin-targeted guide RNA. In some embodiments, the composition comprises one dystrophin-targeted guide RNA. In some embodiments, the composition comprises two dystrophin-targeted guide RNAs. In some embodiments, the composition comprises more than two dystrophin-targeted guide RNAs. In some embodiments, the dystrophin-targeted guide RNAs recognize different DNA sequences (also referred to as target sites). For example, in some embodiments, the composition comprises two dystrophin-targeted guide RNAs that recognize different target sites. The target site(s) recognized by the at least one dystrophin targeted guide RNA may occur in an intron and/or exon of the dystrophin gene. In some embodiments for example, the target site(s) recognized by the at least one dystrophin targeted guide RNA may occur in an intron of the dystrophin gene. In some embodiments, the composition comprises two dystrophin-targeted guide RNAs that recognize different intronic target sites. In some embodiments, the composition comprises two dystrophin-targeted guide RNAs wherein at least one guide RNA recognizes an intron target site. Non-limiting examples of intronic targets sites within the dystrophin gene are identified in Table 2.

[0059] In yet another aspect, the present disclosure provides a method of treating a subject (e.g., a human) with a genetic disease or disorder, comprising a gene editing strategy comprising administering to the subject a composition comprising an adeno-associated viral vector, an RNA-guided nuclease or nickase or a DNA endonuclease, at least one guide RNA, and optionally a donor DNA template in an amount sufficient to (i) delete a skippable exon encoding a mutated gene, wherein such deletion prevents a frameshift of the mutated gene; and/or (ii) correct the DNA sequence of the mutated gene via homology directed repair (HDR) wherein the mutated gene is associated with the cause of the disease or disorder; and wherein said method of treatment reduces at least one symptom associated with the disease or disorder.

[0060] In some embodiments, the present disclosure provides a method of treating a subject (e.g., a human) with a genetic disease or disorder, comprising a gene editing strategy comprising administering to the subject a composition comprising an adeno-associated viral vector, a DNA endonuclease, at least one guide RNA, and a donor DNA template in an amount sufficient to (i) delete a skippable exon encoding a mutated gene, wherein such deletion prevents a frameshift of the mutated gene; and/or (ii) correct the DNA sequence of the mutated gene via homology directed repair (HDR) wherein the mutated gene is associated with the cause of the disease or disorder; and wherein said method of treatment reduces at least one symptom associated with the disease or disorder. In some embodiments, the present disclosure provides a method of treating a subject (e.g., a human) with a genetic disease or disorder, comprising a gene editing strategy comprising administering to the subject a composition comprising an adeno-associated viral vector, a DNA endonuclease, and at least one guide RNA in an amount sufficient to (i) delete a skippable exon encoding a mutated gene, wherein such deletion prevents a frameshift of the mutated gene; wherein the mutated gene is associated with the cause of the disease or disorder; and wherein said method of treatment reduces at least one symptom associated with the disease or disorder.

[0061] In some embodiments of the foregoing methods of treatment, the DNA endonuclease is a Cas9 endonuclease, a Cpf1 endonuclease, or a MAD7 endonuclease. For example, in some embodiments, the DNA endonuclease is a Cas9 endonuclease. In other embodiments, the DNA endonuclease is a Cpf1 endonuclease. In other embodiments, the DNA endonuclease is a MAD7 endonuclease.

[0062] In some embodiments of the foregoing methods of treatment, the composition comprises at least one (e.g., 1, 2, 3, 4, 5 or more) guide RNA. In some embodiments, the composition comprises one guide RNA. In some embodiments, the composition comprises two guide RNAs. In some embodiments, the composition comprises more than two guide RNAs. In some embodiments, the guide RNAs recognize different DNA sequences (also referred to as target sites). For example, in some embodiments, the composition comprises two guide RNAs that recognize different target sites. The target site(s) recognized by the at least one guide RNA may occur in an intron and/or exon of the mutated gene associated with the cause of the disease or disorder. In some embodiments for example, the target site(s) recognized by the at least one guide RNA may occur in an intron of the mutated gene. In some embodiments, the composition comprises two guide RNAs that recognize different intronic target sites. In some embodiments, the composition comprises two guide RNAs wherein at least one guide RNA recognizes an intron target site. Non-limiting examples of intronic targets sites within the dystrophin gene, which is mutated in DMD for example, are identified in Table 2.

[0063] In some embodiments of the foregoing method of treatment, the composition comprises at least one (e.g., 1, 2, 3, 4, 5 or more) guide RNA that recognizes a target site in a gene selected from the group consisting of MYH7, TNNT2, TPM1, MYBPC3, PRKAG2, TNNI3, MYL3, TNN, MYL2, ACTC1, CSRP3, TNNC1, MYH6, VCL, MYOZ2, JPH2, PLN, CALR3, NEXN, MYPN, ACTN2, LDB3, TCAP, FLNC, SOD1, C9ORF72, and RYR. In some embodiments, the composition comprises one guide RNA that recognizes a target site in a gene selected from the group consisting of MYH7, TNNT2, TPM1, MYBPC3, PRKAG2, TNNI3, MYL3, TNN, MYL2, ACTC1, CSRP3, TNNC1, MYH6, VCL, MYOZ2, JPH2, PLN, CALR3, NEXN, MYPN, ACTN2, LDB3, TCAP, FLNC, SOD1, C9ORF72, and RYR. In some embodiments, the composition comprises two guide RNAs that recognize a target site in a gene selected from the group consisting of MYH7, TNNT2, TPM1, MYBPC3, PRKAG2, TNNI3, MYL3, TNN, MYL2, ACTC1, CSRP3, TNNC1, MYH6, VCL, MYOZ2, JPH2, PLN, CALR3, NEXN, MYPN, ACTN2, LDB3, TCAP, FLNC, SOD1, C9ORF72, and RYR. In some embodiments, the composition comprises more than two guide RNAs that recognize a target site in a gene selected from the group consisting of MYH7, TNNT2, TPM1, MYBPC3, PRKAG2, TNNI3, MYL3, TNN, MYL2, ACTC1, CSRP3, TNNC1, MYH6, VCL, MYOZ2, JPH2, PLN, CALR3, NEXN, MYPN, ACTN2, LDB3, TCAP, FLNC, SOD1, C9ORF72, and RYR.

[0064] In some embodiments of the foregoing method of treatment, the composition optionally comprises a donor DNA template to correct the DNA sequence of the mutated gene via a homology directed repair mechanism. When an endonuclease cleaves DNA to effect a double-strand break, such breaks can be repaired by natural, endogenous cellular processes such as homology-directed repair (HDR) and non-homologous end-joining (NHEJ). NHEJ directly joins the DNA ends resulting from a double-strand break without the need for a homologous template. NHEJ is an error-prone repair mechanism that can sometimes result in the loss or addition of nucleotide sequence (small deletions or insertions known as indels), which can disrupt or otherwise alter gene expression. HDR, on the other hand, utilizes a homologous sequence, or donor sequence, as a template for inserting a defined DNA sequence at the break point.

[0065] The donor sequence can be in the endogenous genome, such as a sister chromatid. Alternatively, the donor can be an exogenous nucleic acid, such as a plasmid, a single-strand oligonucleotide, a double-strand oligonucleotide, a duplex oligonucleotide or a virus, that has regions of high homology with the endonuclease-cleaved locus, but which can also contain additional sequence or sequence changes including deletions that can be incorporated into the cleaved target locus. For the purposes of gene editing as described herein, the repair template can be supplied as an exogenous nucleic acid, such as a plasmid, duplex oligonucleotide, single-strand oligonucleotide or viral nucleic acid.

[0066] The donor template may comprise at least a portion of the wild-type sequence of the mutated gene. In this way, a corrected version of the mutated gene can be introduced between the flanking regions of homology so that the corrected nucleic acid sequence becomes incorporated into the target locus. Hence, using the exogenous donor template, HDR results in permanent insertion or correction of a mutated gene, thereby leading to rescued expression and activity of the causative gene, and subsequently, reduction of at least one symptom associated with the disease or disorder. One skilled in the art would appreciate that with other exogenous donor templates, a non-wild-type nucleic acid sequence (such as a transgene) or modification (such as a single or multiple base change or a deletion) can be introduced between the flanking regions of homology so that the additional or altered nucleic acid sequence also becomes incorporated into the target locus. The present disclosure also contemplates such non-wild-type corrections or modifications.

[0067] In some embodiments, the composition optionally comprises a donor DNA template to correct the DNA sequence of the mutated gene via a homology directed repair mechanism. In some embodiments, the donor DNA template is homologous to a gene selected from the group consisting of DMD, MYH7, TNNT2, TPM1, MYBPC3, PRKAG2, TNNI3, MYL3, TNN, MYL2, ACTC1, CSRP3, TNNC1, MYH6, VCL, MYOZ2, JPH2, PLN, CALR3, NEXN, MYPN, ACTN2, LDB3, TCAP, FLNC, SOD1, C9ORF72, and RYR. For example, in some embodiments, the donor DNA template is homologous to RYR. In some embodiments, the donor DNA template is homologous to the dystrophin gene (DMD). In some embodiments, the donor DNA template is homologous to DMD and provides a portion of the wild-type DMD sequence. In some embodiments, the donor DNA template comprises at least a part of exon 1, exon 2, exon 3, exon 4, exon 5, exon 6, exon 7, exon 8, exon 9, exon 10, exon 1 1, exon 12, exon 13, exon 14, exon 15, exon 16, exon 17, exon 18, exon 19, exon 20, exon 21 exon 22, exon 23, exon 24, exon 25, exon 26, exon 27, exon 28, exon 29, exon 30, exon 31 exon 32, exon 33, exon 34, exon 35, exon 36, exon 37, exon 38, exon 39, exon 40, exon 41 exon 42, exon 43, exon 44, exon 45, exon 46, exon 47, exon 48, exon 49, exon 50, exon 51 exon 52, exon 53, exon 54, exon 55, exon 56, exon 57, exon 58, exon 59, exon 60, exon 61 exon 62, exon 63, exon 64, exon 65, exon 66, exon 67, exon 68, exon 69, exon 70, exon 71 exon 72, exon 73, exon 74, exon 75, exon 76, exon 77, exon 78, exon 79, intronic regions, synthetic intronic regions, fragments, combinations thereof, or the entire dystrophin gene.

[0068] In certain embodiments, the present disclosure provides a method of treating a subject (e.g., a human) with a genetic disease or disorder, such as, for example Duchenne muscular dystrophy. In some embodiments, the genetic disease or disorder is a muscle-related disease or disorder selected from the group consisting of Hypertrophic cardiomyopathy (HCM or CMH), amyotrophic lateral sclerosis, Becker's muscular dystrophy, central core disease, centronuclear myopathy (including myotubular myopathy), Charcot-Marie-Tooth disease, congenital muscular dystrophy, congenital myasthenic syndrome, Dejerine-Sottas disease, dermatomyositis, Duchenne muscular dystrophy, Emery-Dreifuss muscular dystrophy, facioscapulohumeral muscular dystrophy, Friedreich's ataxia, hyperthyroid myopathy, hypothyroid myopathy, inclusion body myositis, Lambert-Eaton myasthenic syndrome, Limb-girdle muscular dystrophy, mitochondrial myopathy, myasthenia gravis, myotonia congenita (including Thomsen's disease and Becker disease), nemaline myopathy, paramyotonia congenita, periodic paralysis (including hypokalemic and hyperkalemic), polymyositis, spinal and bulbar muscular atrophy, and spinal muscular atrophy.

[0069] In certain embodiments, the subject to be treated (e.g., a human) has a disease or disorder that is suitable for treatment by an exon skipping therapeutic strategy. As discussed earlier, exon skipping is a strategy in which sections of genes are “skipped” during pre-mRNA splicing, to enlarge a deletion so that it becomes its nearest in-frame counterpart. In the case of DMD, this allows for the creation of a partially deleted but functional dystrophin protein (van Deutekom J, 2003). In certain embodiments, exon skipping is effected by deletion of at least a portion of the targeted exon. For example, in certain embodiments, in DMD exon skipping is effected by deletion of at least a portion of one or more (e.g., 1, 2, 3, 4, 5, 6, 7, 8, 9, 10, 11 or 12) dystrophin exons selected from the group consisting of exon 2, exon 8, exon 17, exon 43, exon 44, exon 45, exon 46, exon 50, exon 51, exon 52, exon 53, and exon 55. In any disease or disorder suitable for treatment by an exon skipping therapeutic strategy, exon skipping would be directed to restoring the reading frame of a mutated gene associated with the cause of the disease or disorder.

[0070] Accordingly, in certain embodiments, the subject to be treated (e.g., a human) has a disease or disorder selected from the group comprising Ataxia-telangiectasia, congenital disorder of glycosylation, fronto-temporal dementia and parkinsonism linked to chromosome 17, Niemann-Pick disease type C, neurofibromatosis type 1, neurofibromatosis type 2, megalencephalic leukoencephalopathy with subcortical cysts type 1, Pelizaeus-Merzbacher disease, familial dysautonomia, Marfan syndrome, and Loeys-Dietz syndrome.

### Endonucleases and RNA-Guided Nucleases

[0071] In some embodiments, the composition administered in a disclosed method of treating subject (e.g., a human) comprises a DNA endonuclease. The DNA endonuclease can be any endonuclease that is capable of cleaving DNA to effect a single or double strand break at the intended locus. For example, the DNA endonuclease can be a MAD1, MAD2, MAD3, MAD4, MAD5, MAD6, MAD7, MAD5, MAD5 MAD10, MAD11, or MAD11 endonuclease (see, e.g., U.S. Pat. No. 9,982,279). The DNA endonuclease can be a Cas1, Cas1 B, Cas2, Cas3, Cas4, Cas5, Cas6, Cas7, Cas8, Cas9 (also known as Csn1 and Csx12), Cas1 OO, Csy1, Csy2, Csy3, Cse1, Cse2, Csc1, Csc2, Csa5, Csn2, Csm2, Csm3, Csm4, Csm5, Csm6, Cmr1, Cmr3, Cmr4, Cmr5, Cmr6, Csb1, Csb2, Csb3, Csx17, Csx14, Csx10, Csx16, CsaX, Csx3, Csx1, Csx15, Csf1, Csf2, Csf3, Csf4, or Cpf1 endonuclease; a homolog thereof, a recombinant of the naturally occurring molecule thereof, a codon-optimized version thereof, a modified version thereof (e.g., a mutated variant such as a nickase), and combinations of any of the foregoing. For example, in some embodiments, the DNA endonuclease is a Cas9 or Cpf1 endonuclease that effects a single-strand break (SSB) or double-strand break (DSB) at a locus within or near the mutated gene (e.g., the dystrophin gene).

[0072] In some embodiments, the DNA endonuclease is a Cas9 endonuclease (e.g., a recombinant Cas9, a codon-optimized Cas9, a modified or mutated Cas9). The Cas9 endonuclease can be derived from a variety of bacterial species. For example, in certain embodiments, the Cas9 endonuclease is derived from Streptococcus thermophiles, Streptococcus pyogenes, Neisseria meningitides, Staphylococcus aureus, or Treponema denticola. In a specific embodiment, the Cas9 endonuclease is derived from Staphylococcus aureus (SaCas9). In another specific embodiment, the Cas9 endonuclease is derived from Streptococcus pyogenes (SpCas9). Wild type Cas9 has two active sites (RuvC and HNH nuclease domains) for cleaving DNA, one for each strand of the double helix. However, nickase variants of Cas9 are readily available (e.g., Addgene, plasmid #: 48873) that are only capable of cleaving one strand of the DNA due to catalytic inactivation of the RuvC or HNH nuclease domains. Accordingly, in a specific embodiment, the Cas9 endonuclease is a mutated SpCas9 endonuclease (e.g., a nickase) and/or a codon-optimized version thereof.

[0073] In other embodiments, the DNA endonuclease is a Cpf1 endonuclease (e.g., a recombinant Cpf1, a codon-optimized Cpf1, a modified or mutated Cpf1). The Cpf1 endonuclease can be derived from a variety of bacterial species. For example, in certain embodiments, the Cpf1 endonuclease is derived from Acidaminococcus bacteria or Lachnospiraceae bacteria. In a specific embodiment, the Cpf1 endonuclease is a Lachnospiraceae bacterium ND2006 Cpf1.

[0074] In other embodiments, the DNA endonuclease is a MAD7 endonuclease (e.g., a recombinant MAD7, a codon-optimized MAD7, a modified or mutated MAD7). MAD7 is a codon optimized endonuclease can be derived from Eubacterium rectale (Inscripta, Boulder, Colo.) MAD7 is described in U.S. Pat. No. 9,982,279.

[0075] In other embodiments, an RNA-guided nuclease is used. Exemplary RNA-guided nucleases include Cas13a, Cas 13b and Cas13d.

### Guide RNAs

[0076] In addition to an endonuclease, methods of treatment presently disclosed also comprise a guide RNA to recruit and direct the endonuclease activity to the locus of a mutated gene, such as a gene associated with the cause of the disease or disorder (e.g., the dystrophin gene). In some embodiments, the composition administered in a disclosed method of treating a subject (e.g., a human) comprises at least one (e.g., 1, 2, 3, 4, 5 or more) guide RNA. For example, in certain embodiments of a method of treatment disclosed herein, the composition comprises one dystrophin-targeted guide RNA. In some embodiments of a method of treatment disclosed herein, the composition comprises two dystrophin-targeted guide RNAs. In some embodiments of a method of treatment disclosed herein, the composition comprises more than two dystrophin-targeted guide RNAs.

[0077] A “guide RNA” or “gRNA” is a genome-targeting nucleic acid (e.g., an RNA in this context) that can direct the activities of an associated DNA endonuclease. In the context of a CRISPR/Cas or CRISPR/Cpf1 system, the endonuclease can bind to the guide RNA, which in turn, specifies the site in the target DNA to which the endonuclease is directed. CRISPR sequences in bacteria are expressed in multiple RNAs and are then processed to create guide strands for RNA. A guide RNA can comprise at least a spacer sequence that hybridizes to a target nucleic acid sequence of interest, and a CRISPR repeat sequence. In some CRISPR systems, the gRNA also comprises a second RNA called the tracrRNA sequence. In such cases the CRISPR repeat sequence and tracrRNA sequence hybridize to each other to form a duplex. The RNA duplex can then bind an endonuclease (e.g., Cas9) to form a complex. The genome-targeting nucleic acid can provide target specificity to the complex by virtue of its association with the endonuclease. The genome-targeting nucleic acid thus can direct the activity of the complexed endonuclease.

[0078] Cleavage by the CRISPR system requires complementary base pairing of the guide RNA to a 20-nucleotide DNA sequence and the requisite protospacer-adjacent motif (PAM), a short nucleotide motif found 3′ to the target site. One can, theoretically, target any unique N₂₀-PAM sequence in the genome using CRISPR technology. Currently, the most commonly used Cas9 protein is from S. pyogenes (SpCas9), which recognizes the PAM sequence NGG, and thus, the CRISPR targeting sequence is N₂₀NGG. The degenerate N in the NGG sequence, means that given a unique sequence of 20 nucleotides (N₂₀), Cas9 would cleave N₂₀AGG, N₂₀TGG, N₂₀CGG, and N₂₀GGG equally which can be an issue for precise targeting of alleles.

[0079] Exemplary Cas9 target sites within the human dystrophin gene that require the NGG PAM are provided in Table 2. Those skilled in the art would appreciate that for each case, the guide RNA directing Cas9 to the specific site is designed to be complementary to the indicated genomic target sequence.

[0080] While PAM sequences for the commonly used S. pyogenes Cas9 (NGG) are abundant throughout the human genome, they are not always positioned correctly to target particular genes for Cas9-mediated modification. Furthermore, a target sequence may have high homology elsewhere in the genome. These additional sequences (so-called “off-targets”) may be unintentionally altered during attempts to use CRISPR mediated genome engineering on the gene of interest. To circumvent this limitation, the present disclosure also contemplates use of S. pyogenes Cas9 variants with varying PAM sequence specificities. For example, the SpCas9 VQR variant exhibits a NGAN (SEQ ID NO: 5) or NGNG (SEQ ID NO: 6) PAM binding specificity; the SpCas9 EQR variant exhibits a NGAG (SEQ ID NO: 7) PAM binding specificity; and the SpCas9 VRER variant exhibits a NGCG (SEQ ID NO: 8) PAM binding specificity.

[0081] The present disclosure also contemplates the use of Cas9 homologs or other endonuclease alternatives that further broaden the range of targetable sites in the human genome due to alternative PAM binding specificities. For example, contemplated herein are S. thermophiles Cas9 that exhibits a NNAGAAW (SEQ ID NO: 9) PAM binding specificity; N. meningitides Cas9 that exhibits a NNNNGATT (SEQ ID NO: 10) PAM binding specificity; S. aureus Cas9 that exhibits a NGRRT (SEQ ID NO: 11) or NGRRN (SEQ ID NO: 12) PAM binding specificity; and T. denticola Cas9 that exhibits a NAAAAC (SEQ ID NO: 13) PAM binding specificity. Also contemplated herein is the use of the Cpf1 endonuclease which allows for targeting of genomic regions with low GC or high AT content. Unlike Cas9, Cpf1 recognizes a T-rich PAM (TTTV (SEQ ID NO: 14)), creates a staggered, double-stranded DNA cut with a 5′ overhang, and does not require a tracrRNA for function.

[0082] Nickase variants of RNA guided endonucleases, for example Cas9, can be used to increase the specificity of CRISPR-mediated genome editing. Wild type Cas9 is typically guided by a single guide RNA designed to hybridize with a specified ˜2.0 nucleotide sequence in the target sequence (such as an endogenous genomic locus). However, several mismatches can be tolerated between the guide RNA and the target locus, effectively reducing the length of required homology in the target site to, for example, as little as 13 nt of homology, and thereby resulting in elevated potential for binding and double-strand nucleic acid cleavage by the CRISPR/Cas9 complex elsewhere in the target genome—also known as off-target cleavage. Because nickase variants of Cas9 each only cut one strand, in order to create a double-strand break it is necessary for a pair of nickases to bind in close proximity and on opposite strands of the target nucleic acid, thereby creating a pair of nicks, which is the equivalent of a double-strand break. This requires that two separate guide RNAs—one for each nickase—must bind in close proximity and on opposite strands of the target nucleic acid. This requirement essentially doubles the minimum length of homology needed for the double-strand break to occur, thereby reducing the likelihood that a double-strand cleavage event will occur elsewhere in the genome, where the two guide RNA sites—if they exist—are unlikely to be sufficiently close to each other to enable the double-strand break to form.

[0083] Accordingly, in some embodiments of the methods of treatment presently disclosed, the composition comprises two guide RNAs. In some embodiments of the methods of treatment presently disclosed, the composition comprises an adeno-associated viral vector, a Cas9 nickase, and at least one (e.g., 2) guide RNA. In some embodiments of the methods of treatment presently disclosed, the composition comprises an adeno-associated viral vector, a Cas9 nickase, and two guide RNAs. In some embodiments of the methods of treatment presently disclosed, the composition comprises an adeno-associated viral vector, a Cas9 nickase, at least one (e.g., 2) guide RNA. In some embodiments, the composition may further comprise a donor DNA template. For example, in some embodiments of the methods of treatment presently disclosed, the composition comprises an adeno-associated viral vector, a Cas9 nickase, at least one (e.g., 2) guide RNA, and a donor DNA template.

[0084] Nickases can also be used to promote homology directed repair (HDR) versus the more error-prone non-homologous end joining. HDR can be used to introduce selected changes into target sites in the genome through the use of specific donor sequences that effectively mediate the desired changes. Descriptions of various CRISPR/Cas systems for use in gene editing can be found, e.g., in international patent application publication number WO2013/176772.

### AAV Vectors

[0085] While CRISPR-based targeting of disease mutations has been shown to be effective in vitro and in vivo, through mouse and other animal studies, delivery constraints have proven to be limiting. For example, there is a need for appropriate somatic cell delivery systems capable of directing the components of the CRISPR/Cas9 or CRISPR/Cpf1 systems to dystrophic muscle or satellite cells in vivo. In this regard, the non-pathogenic adeno-associated virus (AAV) delivery system has proven to be safe and effective and has already been advanced in clinical trials for gene therapy. As such, in applications where transient expression of the CRISPR components is suitable, the AAV vector based systems can be used. For example, AAV vectors are frequently used in ocular gene therapy. Several features of AAV make it an attractive choice: the virus is nonpathogenic, it infects both dividing and non-dividing cells, expression can persist for long periods of time, and it is particularly noteworthy for its history of safety, efficacy and a general lack of toxicity in clinical trials. With AAV vectors, high titer and levels of expression have been obtained. This vector can be produced in large quantities in a relatively simple system. Construction of recombinant AAV vectors are described in a number of publications, including U.S. Pat. No. 5,173,414.

[0086] The AAV genome is a 4.7 kb single-stranded DNA molecule that can be modified to carry up to 5.2 kb of recombinant DNA, although pushing this limit may lead to reduced packaging efficiency and deleted inserts. Due to the large size of the gene encoding the commonly used Cas9 protein (4.1 kb) itself, delivery with a gRNA, including promoter, terminator and viral inverted terminal repeat (ITR) sequences necessary for expression through a single viral vector, is sometimes limited by this AAV packaging capacity. Hence, at times, use of AAV vectors in gene therapy may necessitate co-transduction of multiple AAV vectors.

[0087] Techniques to produce AAV particles, in which an AAV genome to be packaged that includes the polynucleotide to be delivered, rep and cap genes, and helper virus functions are provided to a cell are standard in the art. Packaging cells are typically used to form virus particles that are capable of infecting a host cell. Such cells include 293 cells which package adenovirus, and ψ2 cells or PA317 cells, which package retrovirus. Viral vectors used in gene therapy are usually generated by producing a cell line that packages a nucleic acid vector into a viral particle. The vectors typically contain the minimal viral sequences required for packaging and subsequent integration into a host, other viral sequences being replaced by an expression cassette for the polynucleotide(s) to be expressed. The missing viral functions are typically supplied in trans by the packaging cell line. For example, AAV vectors used in gene therapy typically only possess ITR sequences from the AAV genome which are required for packaging and integration into the host genome. Viral DNA is packaged in a cell line, which contains a helper plasmid encoding the other AAV genes, namely rep and cap, but lacking ITR sequences. The cell line may also be infected with adenovirus as a helper. The helper virus promotes replication of the AAV vector and expression of AAV genes from the helper plasmid. The helper plasmid is not packaged in significant amounts due to a lack of ITR sequences.

[0088] The AAV rep and cap genes can be from any AAV serotype for which recombinant virus can be derived, and can be from a different AAV serotype than the AAV genome ITRs, including, but not limited to, AAV serotypes AAV-1, AAV-2, AAV-3, AAV-5, AAV-6, AAV-7, AAV-8, AAV-9, AAV-10, AAV-11, AAV-12, AAV-13 and AAV rh.74. AAV vector serotypes can be matched to target cell types. For example, the following exemplary cell types can be transduced by the indicated AAV serotypes among others: liver—AAV8, AAV3, AAV5, AAV9; skeletal muscle—AAV1, AAV7, AAV6, AAV8, AAV9, central nervous system—AAV5, AAV1, AAV4, photoreceptor cells—AAV5; lung—AAV9; heart—AAV8; pancreas—AAV8; and kidney AAV2. Production of pseudotyped AAV is disclosed in, for example, international patent application publication number WO01/83692.

[0089] In light of the foregoing, methods of treatment disclosed by the present invention may comprise administration of a composition comprising, at least in part, an adeno-associated viral vector (AAV), a DNA endonuclease, a guide RNA, and/or a donor DNA template. In some embodiments, the composition comprises at least one (e.g., 1, 2 or more) AAV vector. In some embodiments, the composition comprises one AAV vector. In some embodiments, the composition comprises two AAV vectors. In some embodiments, the composition comprises more than two AAV vectors.

[0090] In some embodiments, one or more of the non-AAV components of the composition are packaged into the AAV vector before administering to the subject (e.g., a human). For example, in some embodiments, the DNA endonuclease, the guide RNA(s), and/or the donor DNA template are packaged into the AAV vector. In some embodiments for example, the DNA endonuclease, the guide RNA(s), and/or the donor DNA template are packaged into one AAV vector. In other embodiments, the DNA endonuclease, the guide RNA(s), and/or the donor DNA template are packaged into multiple (e.g., 2) AAV vectors. In general, it has been found that an AAV vector can be a very effective means of delivery of a donor template, though the packaging limits for individual donors is <5 kb. As such, in some embodiments, the DNA endonuclease and guide RNA(s) are packaged into a first AAV vector, and the donor DNA template is packaged into a separate, second AAV vector. In such cases, the methods of treatment contemplated herein may comprise administration of a composition comprising both the first and second AAV vectors.

[0091] The AAV vectors contemplated by the methods of treatment of the present invention can be of any AAV serotype, such as, for example, AAV-1, AAV-2, AAV-3, AAV-4, AAV-5, AAV-6, AAV-7, AAV-8, AAV-9, AAV-10, AAV-11, AAV-12, AAV-13 and AAV rh.74. Notably, the AAV9 serotype has been shown to provide robust expression in skeletal muscle, heart and brain, the major tissues affected in DMD patients. Therefore, in some embodiments, methods of treatment disclosed by the present invention may comprise administration of a composition comprising, at least in part, an AAV9 viral vector. For example, in some embodiments, the administered composition may comprise a DNA endonuclease, at least one dystrophin-targeted guide RNA, and an AAV9 viral vector. In some embodiments, the DNA endonuclease and at least one dystrophin-targeted guide RNA are packaged into an AAV9 viral vector before administration to the subject (e.g., a human).

### EXAMPLES

### Example 1: Use of Gene Editing to Skip Exon Skipping

[0092] The present example demonstrates use of CRISPR to delete mutant or out-of-frame exons, thereby allowing splicing between surrounding exons to recreate an in-frame dystrophin protein that lacks the mutations.

[0093] As shown in FIG. 6A, two targeting guide RNAs, hs132637319 (CATTGGCTTTGATTTCCCTAGGG (SEQ ID NO: 15)) and hs132637262 (ACAGTTGCCTAAGAACTGGTGGG (SEQ ID NO: 16)) were designed to delete exon 51 and maintain coding frame, thus bypassing frameshifting mutations on exon 51. As shown below, the entire amplicon is 1,450 bp, and the expected deletion from both guide RNAs is ˜630 bp.

Human DMD amplicon
(SEQ ID NO: 17)
GAGAGGTTATGTGGCTTTACCAAGGTCCCAGAGTTCCTAGGGCAGAGAAC
AGGATTGTCTACCAGACATTTTAATTCTAGTACTATGCATCTTAACCATT
ACCATAGGCTGACTTACTCTACAGTGTCCAACACTATTCATATTAAGATT
TATTTAATGACTTTGAAACAGTATTTCATGTCTAAATAGAAAAACTACTA
ACTCGCATTTTTAAGAAAATATTGTATCTTGGTTTTTCTTCACTGCTGGC
CAGTTTACTAACAATCTGAAATAAAAAGAAAAAAATATGATAAACTGCTC
CCAGTATAAAATACAGAGCTAAGACAAGAACGTTTCATTGGCTTTGATTT
CCCTAGGGTCCAGCTTCAAATTAATTTACTTCCTATTCAAGGGAATTTTA
AATCAGAAAGAAGATCTTATCCCATCTTGTTTTGCCTTTGTTTTTTCTTG
AATAAAAAAAAAATAAGTAAAATTTATTTCCCTGGCAAGGTCTGAAAACT
TTTGTTTTCTTTACCACTTCCACAATGTATATGATTGTTACTGAGAAGGC
TTATTTAACTTAAGTTACTTGTCCAGGCATGAGAATGAGCAAAATCGTTT
TTTAAAAAATTGTTAAATGTATATTAATGAAAAGGTTGAATCTTTTCATT
TTCTACCATGTATTGCTAAACAAAGTATCCACATTGTTAGAAAAAGATAT
ATAATGTCATGAATAAGAGTTTGGCTCAAATTGTTACTCTTCAATTAAAT
TTGACTTATTGTTATTGAAATTGGCTCTTTAGCTTGTGTTTCTAATTTTT
CTTTTTCTTCTTTTTTCCTTTTTGCAAAAACCCAAAATATTTTAGCTCCT
ACTCAGACTGTTACTCTGGTGACACAACCTGTGGTTACTAAGGAAACTGC
CATCTCCAAACTAGAAATGCCATCTTCCTTGATGTTGGAGGTACCTGCTC
TGGCAGATTTCAACCGGGCTTGGACAGAACTTACCGACTGGCTTTCTCTG
CTTGATCAAGTTATAAAATCACAGAGGGTGATGGTGGGTGACCTTGAGGA
TATCAACGAGATGATCATCAAGCAGAAGGTATGAGAAAAAATGATAAAAG
TTGGCAGAAGTTTTTCTTTAAAATGAAGATTTTCCACCAATCACTTTACT
CTCCTAGACCATTTCCCACCAGTTCTTAGGCAACTGTTTCTCTCTCAGCA
AACACATTACTCTCACTATTCAGCCTAAGTATAATCAAGGATATAAATTA
ATGCAAATAACAAAAGTAGCCATACATTAAAAAGGAAATATACAAAAAAA
AAAAAAAAAAAAAGCAGAAACCTTACAAGAATAGTTGTCTCAGTTAAATT
TACTAAACAACCTGGTATTTTAAAAATCTATTTTATACCAAATAAGTCAC
TCAACTGAGCTATTTACATTTAAACTGTTTGTTTTGGCACTACGCAG

[0094] As shown in FIG. 6B, a PCR analysis following transfection indicated that use of the CRISPR system resulted in a deleted product of the expected size. PCR primers used were:

| Human DMD exon 51 forward primer | |
|---|---|
| GAGAGGTTATGTGGCTTTACCA | (SEQ ID NO: 18) |
| Human DMD exon 51 reverse primer | |
| CTGCGTAGTGCCAAAACAAA | (SEQ ID NO: 19) |

[0095] Sequencing analysis further confirmed the deleted product following targeting (see FIG. 6C).

### Example 2: Use of Gene Editing to Skip Exon Skipping

[0096] This experiment demonstrates the ability to use CRISPR systems to cut the DMD gene at a desired location. Specifically, AAV was used to deliver to mouse N2a cells either (1) Cpf1 and a single guide RNA/crRNA (AAGGCCAAACCTCGGCTTACCTG (SEQ ID NO: 20)) (2) Cfp1 and two guide RNA/crRNA (AAAGAGCAATAAAATGGCTTCAA (SEQ ID NO: 21) and AAGGCCAAACCTCGGCTTACCTG (SEQ ID NO: 22)) or (3) MAD7 and the guide RNA/crRNA AAGGCCAAACCTCGGCTTACC (SEQ ID NO: 23) or TTTAAAGGCCAAACCTCGGCTTACC (SEQ ID NO: 24), which included a PAM sequence.

Cpf1 vector (region cloned between AAV2 ITRs)
was encoded by the following sequence:
(SEQ ID NO: 25)
GCGGCCGCGGTCCGACTAGTTAATTAAAAAAACAGGTAAGCCGAGGTTTG
GCCTTATCTACACTTAGTAGAAATTTTCAGGATGTAGACCGGCCGCCACT
ATAAGGCTCGAAAGAGGAATAAATTTTTCGTTTAGGGTGATTTCCCACAA
AGCACAGCGCGTAATTTGCATGCGCTCTACCCCAGGCTCCTGTGCTAGAC
AAGAAGCCCGCGCATCCGGGCAAGGGATGATGACGTCGTCCTTCAAGAGC
GCCGCCACCATGGCCCCCAAGAAGAAGAGGAAAGTGGGAATCCACGGCGT
GCCTGCCGCCAGCAAGCTGGAGAAGTTTACAAACTGCTACTCCCTGTCTA
AGACCCTGCGCTTCAAGGCCATCCCCGTGGGCAAGACCCAGGAGAACATC
GACAATAAGAGGCTGCTGGTGGAGGACGAGAAGAGAGCCGAGGATTATAA
GGGCGTGAAGAAGCTGCTGGATAGGTACTATCTGTCTTTTATCAACGACG
TGCTGCACAGCATCAAGCTGAAGAATCTGAACAATTACATCAGCCTGTTC
AGGAAGAAGACAAGAACCGAGAAGGAGAATAAGGAGCTGGAGAACCTGGA
GATCAATCTGAGAAAGGAGATCGCCAAGGCCTTCAAGGGCAACGAGGGCT
ACAAGTCCCTGTTTAAGAAGGATATCATCGAGACAATCCTGCCTGAGTTC
CTGGACGATAAGGACGAGATCGCCCTGGTGAACAGCTTCAATGGCTTTAC
CACAGCCTTCACCGGCTTCTTTGATAACAGAGAGAATATGTTTTCCGAGG
AGGCCAAGAGCACATCCATCGCCTTCCGGTGTATCAACGAGAATCTGACC
CGCTACATCTCTAATATGGACATCTTCGAGAAGGTGGACGCCATCTTTGA
TAAGCACGAGGTGCAGGAGATCAAGGAGAAGATCCTGAACAGCGACTATG
ATGTGGAGGATTTCTTTGAGGGCGAGTTCTTTAACTTTGTGCTGACACAG
GAGGGCATCGACGTGTACAATGCCATCATCGGCGGCTTCGTGACCGAGAG
CGGCGAGAAGATCAAGGGCCTGAACGAGTACATCAACCTGTATAATCAGA
AGACCAAGCAGAAGCTGCCTAAGTTTAAGCCACTGTACAAGCAGGTGCTG
AGCGATAGGGAGTCTCTGAGCTTCTACGGCGAGGGCTATACATCCGATGA
GGAGGTGCTGGAGGTGTTTAGAAACACCCTGAACAAGAATTCCGAGATCT
TCAGCTCCATCAAGAAGCTGGAGAAGCTGTTCAAGAATTTTGACGAGTAC
TCTAGCGCCGGCATCTTTGTGAAGAACGGCCCTGCCATCAGCACAATCTC
CAAGGATATCTTCGGCGAGTGGAACGTGATCCGGGACAAGTGGAATGCCG
AGTATGACGATATCCACCTGAAGAAGAAGGCCGTGGTGACCGAGAAGTAC
GAGGACGATAGGAGAAAGTCCTTCAAGAAGATCGGCTCCTTTTCTCTGGA
GCAGCTGCAGGAGTACGCCGACGCCGATCTGTCTGTGGTGGAGAAGCTGA
AGGAGATCATCATCCAGAAGGTGGATGAGATCTACAAGGTGTATGGCTCC
TCTGAGAAGCTGTTCGACGCCGATTTTGTGCTGGAGAAGAGCCTGAAGAA
GAACGACGCCGTGGTGGCCATCATGAAGGACCTGCTGGATTCTGTGAAGA
GCTTCGAGAATTACATCAAGGCCTTCTTTGGCGAGGGCAAGGAGACAAAC
CGGGACGAGTCCTTCTATGGCGATTTTGTGCTGGCCTACGACATCCTGCT
GAAGGTGGACCACATCTACGATGCCATCCGCAATTATGTGACCCAGAAGC
CATACTCTAAGGATAAGTTCAAGCTGTATTTTCAGAACCCCCAGTTCATG
GGCGGCTGGGACAAGGATAAGGAGACAGACTATAGGGCCACCATCCTGAG
ATACGGCTCCAAGTACTATCTGGCCATCATGGATAAGAAGTACGCCAAGT
GCCTGCAGAAGATCGACAAGGACGATGTGAACGGCAATTACGAGAAGATC
AACTATAAGCTGCTGCCCGGCCCTAATAAGATGCTGCCTAAGGTGTTCTT
TTCTAAGAAGTGGATGGCCTACTATAACCCAAGCGAGGACATCCAGAAGA
TCTACAAGAATGGCACATTCAAGAAGGGCGATATGTTTAACCTGAATGAC
TGTCACAAGCTGATCGACTTCTTTAAGGATAGCATCTCCAGGTATCCTAA
GTGGTCCAATGCCTACGATTTCAACTTTTCTGAGACAGAGAAGTATAAGG
ACATCGCCGGCTTTTACAGAGAGGTGGAGGAGCAGGGCTATAAGGTGAGC
TTCGAGTCTGCCAGCAAGAAGGAGGTGGATAAGCTGGTGGAGGAGGGCAA
GCTGTACATGTTCCAGATCTATAACAAGGACTTTTCCGATAAGTCTCACG
GCACACCAAATCTGCACACCATGTACTTCAAGCTGCTGTTTGACGAGAAC
AATCACGGCCAGATCAGGCTGAGCGGAGGAGCAGAGCTGTTCATGAGGAG
GGCCTCCCTGAAGAAGGAGGAGCTGGTGGTGCACCCAGCAAACTCCCCTA
TCGCCAACAAGAATCCAGATAATCCCAAGAAGACCACAACCCTGTCCTAC
GACGTGTATAAGGATAAGAGGTTTTCTGAGGACCAGTACGAGCTGCACAT
CCCAATCGCCATCAATAAGTGCCCCAAGAACATCTTCAAGATCAATACAG
AGGTGAGAGTGCTGCTGAAGCACGACGATAACCCATATGTGATCGGCATC
GATCGGGGCGAGCGCAATCTGCTGTACATCGTGGTGGTGGACGGCAAGGG
CAACATCGTGGAGCAGTATTCCCTGAACGAGATCATCAACAACTTCAACG
GCATCCGGATCAAGACAGATTACCACTCTCTGCTGGACAAGAAGGAGAAG
GAGCGGTTCGAGGCCCGCCAGAACTGGACCTCCATCGAGAATATCAAGGA
GCTGAAGGCCGGCTATATCTCTCAGGTGGTGCACAAGATCTGCGAGCTGG
TGGAGAAGTACGATGCCGTGATCGCCCTGGAGGACCTGAACTCTGGCTTT
AAGAATAGCCGCGTGAAGGTGGAGAAGCAGGTGTATCAGAAGTTCGAGAA
GATGCTGATCGATAAGCTGAACTACATGGTGGACAAGAAGTCTAATCCAT
GTGCAACAGGCGGCGCCCTGAAGGGATATCAGATCACCAATAAGTTCGAG
AGCTTTAAGTCCATGTCTACCCAGAACGGCTTCATCTTTTACATCCCTGC
CTGGCTGACATCCAAGATCGACCCATCTACCGGCTTCGTGAACCTGCTGA
AGACAAAGTATACCAGCATCGCCGATTCCAAGAAGTTCATCAGCTCCTTT
GACCGGATCATGTACGTGCCAGAGGAGGATCTGTTCGAGTTTGCCCTGGA
CTATAAGAACTTCTCTCGCACAGACGCCGATTACATCAAGAAGTGGAAGC
TGTACAGCTATGGCAACAGGATCAGAATCTTCCGGAATCCCAAGAAGAAC
AACGTGTTCGACTGGGAGGAGGTGTGCCTGACCAGCGCCTATAAGGAGCT
GTTCAACAAGTACGGCATCAATTATCAGCAGGGCGATATCCGCGCCCTGC
TGTGCGAGCAGTCCGACAAGGCCTTCTACTCTAGCTTTATGGCCCTGATG
AGCCTGATGCTGCAGATGCGGAATTCCATCACAGGCCGCACCGACGTGGA
TTTTCTGATCAGCCCCGTGAAGAACTCCGACGGCATCTTCTACGATAGCA
GGAACTATGAGGCCCAGGAGAATGCCATCCTGCCTAAGAACGCCGACGCC
AATGGCGCCTATAACATCGCCAGAAAGGTGCTGTGGGCCATCGGCCAGTT
CAAGAAGGCCGAGGACGAGAAGCTGGATAAGGTGAAGATCGCCATCTCTA
ACAAGGAGTGGCTGGAGTACGCCCAGACCAGCGTGAAGCATAAACGACCA
GCCGCAACTAAAAAGGCAGGGCAGGCAAAGAAGAAGAAAGGAAGCTAACC
GGTCAGACATGATAAGATACATTGATGAGTTTGGACAAACCACAACTAGA
ATGCAGTGAAAAAAATGCTTTATTTGTGAAATTTGTGATGCTATTGCTTT
ATTTGTAACCATTATAAGCTGCAATAAACAAGTTAACAACAACAATTGCA
TTCATTTTATGTTTCAGGTTCAGGGGGAGGTGTGGGAGGTTTTTTAAAGC
TAGCGGCCGC
Cpf1 dual vector (region cloned between AAV2 ITRs)
was encoded by the following sequence:
(SEQ ID NO: 26)
GCGGCCGCGGTCCGACTAGTTAATTAAAAAAACAGGTAAGCCGAGGTTTG
GCCTTATCTACACTTAGTAGAAATTTTGAAGCCATTTTATTGCTCTTTAT
CTACACTTAGTAGAAATTTTCAGGATGTAGACCGGCCGCCACTATAAGGC
TCGAAAGAGGAATAAATTTTTCGTTTAGGGTGATTTCCCACAAAGCACAG
CGCGTAATTTGCATGCGCTCTACCCCAGGCTCCTGTGCTAGACAAGAAGC
CCGCGCATCCGGGCAAGGGATGATGACGTCGTCCTTCAAGAGCGCCGCCA
CCATGGCCCCCAAGAAGAAGAGGAAAGTGGGAATCCACGGCGTGCCTGCC
GCCAGCAAGCTGGAGAAGTTTACAAACTGCTACTCCCTGTCTAAGACCCT
GCGCTTCAAGGCCATCCCCGTGGGCAAGACCCAGGAGAACATCGACAATA
AGAGGCTGCTGGTGGAGGACGAGAAGAGAGCCGAGGATTATAAGGGCGTG
AAGAAGCTGCTGGATAGGTACTATCTGTCTTTTATCAACGACGTGCTGCA
CAGCATCAAGCTGAAGAATCTGAACAATTACATCAGCCTGTTCAGGAAGA
AGACAAGAACCGAGAAGGAGAATAAGGAGCTGGAGAACCTGGAGATCAAT
CTGAGAAAGGAGATCGCCAAGGCCTTCAAGGGCAACGAGGGCTACAAGTC
CCTGTTTAAGAAGGATATCATCGAGACAATCCTGCCTGAGTTCCTGGACG
ATAAGGACGAGATCGCCCTGGTGAACAGCTTCAATGGCTTTACCACAGCC
TTCACCGGCTTCTTTGATAACAGAGAGAATATGTTTTCCGAGGAGGCCAA
GAGCACATCCATCGCCTTCCGGTGTATCAACGAGAATCTGACCCGCTACA
TCTCTAATATGGACATCTTCGAGAAGGTGGACGCCATCTTTGATAAGCAC
GAGGTGCAGGAGATCAAGGAGAAGATCCTGAACAGCGACTATGATGTGGA
GGATTTCTTTGAGGGCGAGTTCTTTAACTTTGTGCTGACACAGGAGGGCA
TCGACGTGTACAATGCCATCATCGGCGGCTTCGTGACCGAGAGCGGCGAG
AAGATCAAGGGCCTGAACGAGTACATCAACCTGTATAATCAGAAGACCAA
GCAGAAGCTGCCTAAGTTTAAGCCACTGTACAAGCAGGTGCTGAGCGATA
GGGAGTCTCTGAGCTTCTACGGCGAGGGCTATACATCCGATGAGGAGGTG
CTGGAGGTGTTTAGAAACACCCTGAACAAGAATTCCGAGATCTTCAGCTC
CATCAAGAAGCTGGAGAAGCTGTTCAAGAATTTTGACGAGTACTCTAGCG
CCGGCATCTTTGTGAAGAACGGCCCTGCCATCAGCACAATCTCCAAGGAT
ATCTTCGGCGAGTGGAACGTGATCCGGGACAAGTGGAATGCCGAGTATGA
CGATATCCACCTGAAGAAGAAGGCCGTGGTGACCGAGAAGTACGAGGACG
ATAGGAGAAAGTCCTTCAAGAAGATCGGCTCCTTTTCTCTGGAGCAGCTG
CAGGAGTACGCCGACGCCGATCTGTCTGTGGTGGAGAAGCTGAAGGAGAT
CATCATCCAGAAGGTGGATGAGATCTACAAGGTGTATGGCTCCTCTGAGA
AGCTGTTCGACGCCGATTTTGTGCTGGAGAAGAGCCTGAAGAAGAACGAC
GCCGTGGTGGCCATCATGAAGGACCTGCTGGATTCTGTGAAGAGCTTCGA
GAATTACATCAAGGCCTTCTTTGGCGAGGGCAAGGAGACAAACCGGGACG
AGTCCTTCTATGGCGATTTTGTGCTGGCCTACGACATCCTGCTGAAGGTG
GACCACATCTACGATGCCATCCGCAATTATGTGACCCAGAAGCCATACTC
TAAGGATAAGTTCAAGCTGTATTTTCAGAACCCCCAGTTCATGGGCGGCT
GGGACAAGGATAAGGAGACAGACTATAGGGCCACCATCCTGAGATACGGC
TCCAAGTACTATCTGGCCATCATGGATAAGAAGTACGCCAAGTGCCTGCA
GAAGATCGACAAGGACGATGTGAACGGCAATTACGAGAAGATCAACTATA
AGCTGCTGCCCGGCCCTAATAAGATGCTGCCTAAGGTGTTCTTTTCTAAG
AAGTGGATGGCCTACTATAACCCAAGCGAGGACATCCAGAAGATCTACAA
GAATGGCACATTCAAGAAGGGCGATATGTTTAACCTGAATGACTGTCACA
AGCTGATCGACTTCTTTAAGGATAGCATCTCCAGGTATCCTAAGTGGTCC
AATGCCTACGATTTCAACTTTTCTGAGACAGAGAAGTATAAGGACATCGC
CGGCTTTTACAGAGAGGTGGAGGAGCAGGGCTATAAGGTGAGCTTCGAGT
CTGCCAGCAAGAAGGAGGTGGATAAGCTGGTGGAGGAGGGCAAGCTGTAC
ATGTTCCAGATCTATAACAAGGACTTTTCCGATAAGTCTCACGGCACACC
AAATCTGCACACCATGTACTTCAAGCTGCTGTTTGACGAGAACAATCACG
GCCAGATCAGGCTGAGCGGAGGAGCAGAGCTGTTCATGAGGAGGGCCTCC
CTGAAGAAGGAGGAGCTGGTGGTGCACCCAGCAAACTCCCCTATCGCCAA
CAAGAATCCAGATAATCCCAAGAAGACCACAACCCTGTCCTACGACGTGT
ATAAGGATAAGAGGTTTTCTGAGGACCAGTACGAGCTGCACATCCCAATC
GCCATCAATAAGTGCCCCAAGAACATCTTCAAGATCAATACAGAGGTGAG
AGTGCTGCTGAAGCACGACGATAACCCATATGTGATCGGCATCGATCGGG
GCGAGCGCAATCTGCTGTACATCGTGGTGGTGGACGGCAAGGGCAACATC
GTGGAGCAGTATTCCCTGAACGAGATCATCAACAACTTCAACGGCATCCG
GATCAAGACAGATTACCACTCTCTGCTGGACAAGAAGGAGAAGGAGCGGT
TCGAGGCCCGCCAGAACTGGACCTCCATCGAGAATATCAAGGAGCTGAAG
GCCGGCTATATCTCTCAGGTGGTGCACAAGATCTGCGAGCTGGTGGAGAA
GTACGATGCCGTGATCGCCCTGGAGGACCTGAACTCTGGCTTTAAGAATA
GCCGCGTGAAGGTGGAGAAGCAGGTGTATCAGAAGTTCGAGAAGATGCTG
ATCGATAAGCTGAACTACATGGTGGACAAGAAGTCTAATCCATGTGCAAC
AGGCGGCGCCCTGAAGGGATATCAGATCACCAATAAGTTCGAGAGCTTTA
AGTCCATGTCTACCCAGAACGGCTTCATCTTTTACATCCCTGCCTGGCTG
ACATCCAAGATCGACCCATCTACCGGCTTCGTGAACCTGCTGAAGACAAA
GTATACCAGCATCGCCGATTCCAAGAAGTTCATCAGCTCCTTTGACCGGA
TCATGTACGTGCCAGAGGAGGATCTGTTCGAGTTTGCCCTGGACTATAAG
AACTTCTCTCGCACAGACGCCGATTACATCAAGAAGTGGAAGCTGTACAG
CTATGGCAACAGGATCAGAATCTTCCGGAATCCCAAGAAGAACAACGTGT
TCGACTGGGAGGAGGTGTGCCTGACCAGCGCCTATAAGGAGCTGTTCAAC
AAGTACGGCATCAATTATCAGCAGGGCGATATCCGCGCCCTGCTGTGCGA
GCAGTCCGACAAGGCCTTCTACTCTAGCTTTATGGCCCTGATGAGCCTGA
TGCTGCAGATGCGGAATTCCATCACAGGCCGCACCGACGTGGATTTTCTG
ATCAGCCCCGTGAAGAACTCCGACGGCATCTTCTACGATAGCAGGAACTA
TGAGGCCCAGGAGAATGCCATCCTGCCTAAGAACGCCGACGCCAATGGCG
CCTATAACATCGCCAGAAAGGTGCTGTGGGCCATCGGCCAGTTCAAGAAG
GCCGAGGACGAGAAGCTGGATAAGGTGAAGATCGCCATCTCTAACAAGGA
GTGGCTGGAGTACGCCCAGACCAGCGTGAAGCATAAACGACCAGCCGCAA
CTAAAAAGGCAGGGCAGGCAAAGAAGAAGAAAGGAAGCTAACCGGTCAGA
CATGATAAGATACATTGATGAGTTTGGACAAACCACAACTAGAATGCAGT
GAAAAAAATGCTTTATTTGTGAAATTTGTGATGCTATTGCTTTATTTGTA
ACCATTATAAGCTGCAATAAACAAGTTAACAACAACAATTGCATTCATTT
TATGTTTCAGGTTCAGGGGGAGGTGTGGGAGGTTTTTTAAAGCTAGCGGC
CGC

[0097] As shown in FIGS. 7A-C, an Interference of CRISPR Edits (ICE) analysis was performed indicating cutting of the mouse DMD gene and mutations around the expected site (dotted line) in exon 23 following infection for all three experiments. A discussion of ICE analysis is found at www.synthego.com.

MAD7 vector (region cloned between AAV2 ITRs)
was encoded by the following sequence:
(SEQ ID NO: 28)
GCGGCCGCGGTCCGACTAGTTAATTAAAAAAAGGTAAGCCGAGGTTTGGC
CTTATCTACAAGAGTAGAAATTAAAAAGGTCTTTTGACTTCAGGATGTAG
ACCGGCCGCCACTATAAGGCTCGAAAGAGGAATAAATTTTTCGTTTAGGG
TGATTTCCCACAAAGCACAGCGCGTAATTTGCATGCGCTCTACCCCAGGC
TCCTGTGCTAGACAAGAAGCCCGCGCATCCGGGCAAGGGATGATGACGTC
GTCCTTCAAGAGCGCCGCCACCATGGCACCCAAGAAGAAAAGAAAGGTCG
GAATCCACGGAGTCCCAGCAGCTAACAATGGAACTAACAACTTCCAGAAC
TTCATCGGGATCAGCTCCCTGCAGAAGACCCTGAGGAACGCCCTGATCCC
CACAGAGACAACACAGCAGTTCATCGTGAAGAATGGCATCATCAAGGAGG
ATGAGCTGAGGGGCGAGAACAGACAGATCCTGAAGGACATCATGGACGAT
TACTATAGAGGCTTCATCAGCGAGACACTGTCTAGCATCGACGATATCGA
CTGGACATCCCTGTTTGAGAAGATGGAGATCCAGCTGAAGAATGGCGATA
ACAAGGACACCCTGATCAAGGAGCAGACAGAGTACAGGAAGGCCATCCAC
AAGAAGTTCGCCAATGACGATAGATTCAAGAACATGTTTTCCGCCAAGCT
GATCTCTGACATCCTGCCTGAGTTTGTGATCCACAACAATAACTATAGCG
CCTCCGAGAAGGAGGAGAAGACCCAGGTCATCAAGCTGTTCAGCCGGTTT
GCCACATCCTTCAAGGACTACTTTAAGAATCGCGCCAACTGCTTCAGCGC
CGACGATATCTCCTCTAGCTCCTGTCACCGGATCGTGAATGATAACGCCG
AGATCTTCTTTTCCAACGCCCTGGTGTACAGGAGAATCGTGAAGTCTCTG
AGCAATGACGATATCAACAAGATCTCTGGCGATATGAAGGACTCTCTGAA
GGAGATGAGCCTGGAGGAGATCTACAGCTATGAGAAGTATGGCGAGTTCA
TCACCCAGGAGGGCATCTCTTTTTACAACGACATCTGCGGCAAGGTCAAT
AGCTTCATGAACCTGTATTGTCAGAAGAATAAGGAGAATAAGAACCTGTA
CAAGCTGCAGAAGCTGCACAAGCAGATCCTGTGCATCGCCGATACAAGCT
ATGAGGTGCCATACAAGTTCGAGTCTGACGAGGAGGTGTACCAGAGCGTG
AATGGCTTTCTGGATAACATCTCTAGCAAGCACATCGTGGAGAGGCTGAG
AAAGATCGGCGATAATTATAACGGCTACAACCTGGACAAGATCTACATCG
TGTCCAAGTTCTATGAGTCCGTGTCTCAGAAGACCTATCGCGACTGGGAG
ACAATCAACACAGCCCTGGAGATCCACTACAATAACATCCTGCCCGGCAA
CGGCAAGAGCAAGGCCGATAAGGTGAAGAAGGCCGTGAAGAATGACCTGC
AGAAGTCCATCACCGAGATCAATGAGCTGGTGAGCAACTATAAGCTGTGC
TCCGACGATAACATCAAGGCCGAGACATACATCCACGAGATCAGCCACAT
CCTGAATAACTTCGAGGCCCAGGAGCTGAAGTATAATCCCGAGATCCACC
TGGTGGAGTCCGAGCTGAAGGCCTCTGAGCTGAAGAATGTGCTGGACGTG
ATCATGAACGCCTTCCACTGGTGTTCCGTGTTTATGACCGAGGAGCTGGT
GGACAAGGATAATAACTTTTACGCCGAGCTGGAGGAGATCTATGATGAGA
TCTACCCTGTGATCTCCCTGTACAATCTGGTGCGGAACTATGTGACCCAG
AAGCCTTACTCTACAAAGAAGATCAAGCTGAACTTCGGAATCCCAACCCT
GGCCGACGGATGGAGCAAGTCCAAGGAGTACTCTAATAACGCCATCATCC
TGATGCGCGATAATCTGTACTATCTGGGCATCTTTAATGCCAAGAACAAG
CCTGACAAGAAGATCATCGAGGGCAATACAAGCGAGAACAAGGGCGATTA
TAAGAAGATGATCTACAATCTGCTGCCCGGCCCTAACAAGATGATCCCCA
AGGTGTTCCTGTCCTCTAAGACCGGCGTGGAGACATATAAGCCTAGCGCC
TACATCCTGGAGGGCTATAAGCAGAACAAGCACATCAAGAGCTCCAAGGA
CTTCGATATCACCTTTTGCCACGATCTGATCGACTACTTCAAGAATTGTA
TCGCCATCCACCCAGAGTGGAAGAACTTCGGCTTTGATTTCTCCGACACC
TCTACATATGAGGACATCTCCGGCTTTTACAGGGAGGTGGAGCTGCAGGG
CTATAAGATCGATTGGACATACATCTCTGAGAAGGACATCGATCTGCTGC
AGGAGAAGGGCCAGCTGTACCTGTTCCAGATCTATAACAAGGACTTCAGC
AAGAAGAGCACCGGCAATGACAACCTGCACACAATGTACCTGAAGAATCT
GTTCTCCGAGGAGAACCTGAAGGACATCGTGCTGAAGCTGAATGGCGAGG
CCGAGATCTTCTTTAGAAAGTCTAGCATCAAGAATCCTATCATCCACAAG
AAGGGCTCTATCCTGGTGAACAGGACCTATGAGGCCGAGGAGAAGGACCA
GTTCGGCAACATCCAGATCGTGAGAAAGAATATCCCAGAGAACATCTACC
AGGAGCTGTACAAGTACTTCAACGATAAGAGCGACAAGGAGCTGTCCGAT
GAGGCCGCCAAGCTGAAGAATGTGGTGGGACACCACGAGGCAGCAACCAA
CATCGTGAAGGATTACAGGTACACATACGACAAGTACTTCCTGCACATGC
CAATCACCATCAATTTCAAGGCCAACAAGACAGGCTTTATCAACGACCGC
ATCCTGCAGTATATCGCCAAGGAGAAGGATCTGCACGTGATCGGAATCGA
CCGGGGCGAGCGCAATCTGATCTACGTGTCTGTGATCGACACCTGTGGCA
ACATCGTGGAGCAGAAGAGCTTTAATATCGTGAACGGCTATGATTACCAG
ATCAAGCTGAAGCAGCAGGAGGGAGCAAGGCAGATCGCACGCAAGGAGTG
GAAGGAGATCGGCAAGATCAAGGAGATCAAGGAGGGCTACCTGAGCCTGG
TCATCCACGAGATCTCTAAGATGGTCATCAAGTATAACGCCATCATCGCT
ATGGAGGACCTGAGCTATGGCTTCAAGAAGGGCCGGTTTAAGGTGGAGCG
CCAGGTGTATCAGAAGTTCGAGACAATGCTGATCAATAAGCTGAACTACC
TGGTGTTTAAGGACATCTCCATCACCGAGAACGGCGGCCTGCTGAAGGGC
TATCAGCTGACATACATCCCTGATAAGCTGAAGAATGTGGGCCACCAGTG
CGGCTGTATCTTCTACGTGCCAGCCGCCTATACCTCCAAGATCGACCCCA
CCACAGGCTTTGTGAACATCTTTAAGTTCAAGGATCTGACAGTGGACGCC
AAGCGGGAGTTCATCAAGAAGTTTGATTCTATCCGCTATGACAGCGAGAA
GAACCTGTTTTGCTTCACCTTTGATTACAATAACTTCATCACCCAGAATA
CAGTGATGTCCAAGTCCTCTTGGAGCGTGTACACATACGGCGTGAGGATC
AAGCGGCGCTTCGTGAATGGCAGATTTTCTAACGAGAGCGATACCATCGA
CATCACAAAGGATATGGAGAAGACCCTGGAGATGACAGACATCAACTGGA
GGGATGGCCACGACCTGAGACAGGATATCATCGACTACGAGATCGTGCAG
CACATCTTCGAGATCTTTCGGCTGACCGTGCAGATGCGCAACTCTCTGAG
CGAGCTGGAGGACAGGGATTATGACAGACTGATCTCCCCAGTGCTGAATG
AGAATAACATCTTCTACGATTCTGCCAAGGCAGGCGACGCACTGCCAAAG
GATGCAGACGCAAACGGCGCCTATTGTATCGCCCTGAAGGGCCTGTACGA
GATCAAGCAGATCACAGAGAACTGGAAGGAGGATGGCAAGTTTAGCAGAG
ACAAGCTGAAGATCTCCAATAAGGACTGGTTCGACTTTATTCAGAACAAG
AGGTATCTGCCTAAGAAGAAGAGGAAGGTGTAACCGGTCAGACATGATAA
GATACATTGATGAGTTTGGACAAACCACAACTAGAATGCAGTGAAAAAAA
TGCTTTATTTGTGAAATTTGTGATGCTATTGCTTTATTTGTAACCATTAT
AAGCTGCAATAAACAAGTTAACAACAACAATTGCATTCATTTTATGTTTC
AGGTTCAGGGGGAGGTGTGGGAGGTTTTTTAAAGCTAGCGGCCGC

### EQUIVALENTS

[0098] The present invention is not to be limited in scope by the specific embodiments described which are intended as single illustrations of individual aspects of the invention, and functionally equivalent methods and components are within the scope of the invention. Indeed, various modifications of the invention, in addition to those shown and described herein, will become apparent to those skilled in the art from the foregoing description and accompanying drawings using no more than routine experimentation. Such modifications and equivalents are intended to fall within the scope of the appended claims.

### INCORPORATION BY REFERENCE

[0099] The entire disclosure of each of the patent and scientific documents referred to herein is incorporated by reference for all purposes. The reference van Deutekom J, van Ommen G. Nat Rev Genet. 2003 October; 4(10):774-83 is incorporated herein by reference for all purposes.

TABLE 2
Dystrophin gene intronic target sites

| | | SEQ |
|---|---|---|
| | | ID |
| grID | sequence | NO. |
| hs132692864 | TATGACAAGAGACATCCATGGGG | 29 |
| hs132693671 | AAAATGTGTAAGTAGCACTGTGG | 30 |
| hs132688560 | ATACTTATATTCAAGCACAGGGG | 31 |
| hs132693865 | TAGGAAGATTCTATGCACAGGGG | 32 |
| hs132685714 | AAAGAACCTAAAGTACACAGGGG | 33 |
| hs132684395 | CATGTAGATTAGCCTCACAGGGG | 34 |
| hs132685328 | ATTGAGATTAGAGCAACACGGGG | 35 |
| hs132689934 | TGCAACTAAATATCACACTGTGG | 36 |
| hs132691849 | TCAGATAGTCTACTACCACGTGG | 37 |
| hs132689886 | TGTTATGAACAGATGTTACGTGG | 38 |
| hs132686696 | CGGGTGGGGAAAGAAATATGCGG | 39 |
| hs132690456 | TCCAAACCAGAATAGCACAGTGG | 40 |
| hs132692865 | ATGACAAGAGACATCCATGGGGG | 41 |
| hs132684946 | ACACCCAGATTAAGGCATCGGGG | 42 |
| hs132685812 | GGATCAGGAAGGTCTCACTGTGG | 43 |
| hs132684886 | GAAGATGTCAGGGAACCCTGGGG | 44 |
| hs132687410 | AAGACTATTACAATAAAACGGGG | 45 |
| hs132687348 | AAGATCTGGGAACAACTACGTGG | 46 |
| hs132686482 | ACAGGAATCTGGGAACACTGAGG | 47 |
| hs132687291 | TTTCTACAATCTCATCACTGTGG | 48 |
| hs132692095 | GACCACCCTAAAAATCACCAGGG | 49 |
| hs132686763 | ATGCTTTCTCTAAAACACAGAGG | 50 |
| hs132693151 | TCAATTAGTACAAAGCCATGGGG | 51 |
| hs132687127 | TATCGTACCGATGAACCCTGAGG | 52 |
| hs132683622 | AAATAGACACGATTGCTACGTGG | 53 |
| hs132693659 | GTTTCATGAATAAAGCCCAGAGG | 54 |
| hs132684410 | ACAGACACCCCAAATCCTGGAGG | 55 |
| hs132688945 | GGGTGATTTCAAAGCCACAGAGG | 56 |
| hs132688960 | GCACTTGGCTGGTAATACAGGGG | 57 |
| hs132683504 | TTAGTGGTCAGCTTACAATGAGG | 58 |
| hs132687589 | CTTGACTCAATTCTCCTGAGCGG | 59 |
| hs132693827 | CTTACACATGACCTCCCCAGAGG | 60 |
| hs132692747 | AATCTTAGGAGTAATTACCACGG | 61 |
| hs132693213 | TTGCATTCCAAGAATCACAGTGG | 62 |
| hs132686932 | GTCATCCAAATATATCCCAGGGG | 63 |
| hs132692495 | TGTAACTGGAGACAAGAAGGGGG | 64 |
| hs132690588 | TCAACCAATATGGATCACTGTGG | 65 |
| hs132686172 | CCAAACTGATAAGTCCTCAGGGG | 66 |
| hs132690946 | AATTGTCCAGTAAATCCATGTGG | 67 |
| hs132690397 | ACTGTATAGGAACTACATGGAGG | 68 |
| hs132687602 | AATCATACTGAATATCACTGAGG | 69 |
| hs132683437 | TTTATTTTATTCTCTCTACGGGG | 70 |
| hs132686632 | ACTGGGAAGCTCTTCCACAGTGG | 71 |
| hs132692204 | TAGGGAGGAATCCCACAATGGGG | 72 |
| hs132691458 | AATCCCCTACATTCTCAGGGAGG | 73 |
| hs132688992 | GAAGTGCTTGAAGAGGAACAGGG | 74 |
| hs132688164 | TAAATGAGAGAAGCCCATGGTGG | 75 |
| hs132685798 | CATCATCTCCTACTTCACTGGGG | 76 |
| hs132689462 | CAGACTCTTAAGCAGCAGTGGGG | 77 |
| hs132692750 | GAATGAAAACAAACCCACCGTGG | 78 |
| hs132692262 | CAGACATTCAAAATTCTGGGTGG | 79 |
| hs132688865 | TCTTCTGTGACTATGCAGGGTGG | 80 |
| hs132692640 | AAAGTGAAAGAGCCTCCTCGAGG | 81 |
| hs132688568 | GAGATAAAGAGAAAGATTGGGGG | 82 |
| hs132689902 | GTGTAAAGAACACTACAACACGG | 83 |
| hs132684145 | TGACTAAACACTGAGCCATGAGG | 84 |
| hs132683758 | TCTATTGGCAATGTACACTGAGG | 85 |
| hs132684428 | CAGAGATGTGACATCCAATGTGG | 86 |
| hs132690386 | ATAATAGACATGAAACAACAAGG | 87 |
| hs132687217 | ATAAGCGGGTAGCAGTCCTGCGG | 88 |
| hs132689080 | ATAAATATGATGATCCCAGGAGG | 89 |
| hs132690427 | CTACAGGACTCAGATCTGGGAGG | 90 |
| hs132685282 | TCTAGGCTAGAGTAAAGCTGTGG | 91 |
| hs132692268 | AATTGCGTATGGCTTCATGTGGG | 92 |
| hs132684093 | GATCAAGATCAAGACCGGTGTGG | 93 |
| hs132691237 | TCACCACAGCAACCCCAGGGAGG | 94 |
| hs132684573 | AGTATGTGACGTCAATTGAGTGG | 95 |
| hs132689458 | AGCAGTCCTCAGTAACTCAGGGG | 96 |
| hs132690552 | ACTCTGGGACATGAATCTAGAGG | 97 |
| hs132687556 | CTGTTACCAGTACAGTACAGTGG | 98 |
| hs132684205 | CCTGGGAAGTCAATGTACAGTGG | 99 |
| hs132692233 | TGTGTGTTAGGCCTGGACTGAGG | 100 |
| hs132684753 | ATGTTAAGCCCTCAGCATCGAGG | 101 |
| hs132686955 | GTAAGAGAAAAGTACCAACAGGG | 102 |
| hs132685684 | CATTTCTTGAGAAATCCTTGGGG | 103 |
| hs132691062 | AGAACAATAACACTACCACCCGG | 104 |
| hs132692511 | ACTGTGGTTTAAATGCAGTGAGG | 105 |
| hs132687555 | TTACCAGTACAGTACAGTGGTGG | 106 |
| hs132688050 | TAGAGCTGTGTGAATCCATGGGG | 107 |
| hs132691218 | CGATTAGGTCACAACCAATGGGG | 108 |
| hs132685069 | AGTGGACTTAGGAAGGTACAGGG | 109 |
| hs132692859 | GTGGAAATAATGGTAGATGTGGG | 110 |
| hs132693083 | TCCAAACAGACAGAAATAGGTGG | 111 |
| hs132687780 | ATATCTACTGTGAAATACTGTGG | 112 |
| hs132688699 | GGGTACCTGAGGGATCTGTGAGG | 113 |
| hs132684794 | GAGGTATTGAAGGAATCCAGCGG | 114 |
| hs132688163 | TCTTAAATGAGAGAAGCCCATGG | 115 |
| hs132689423 | AACAGTATTAGAGAAAACCAGGG | 116 |
| hs132689321 | GTGCCATAGAGCACTCTTGGGGG | 117 |
| hs132686643 | CTTGGCTGGATATCGAACAGTGG | 118 |
| hs132693602 | TTCATACACACTCATCATGGGGG | 119 |
| hs132692513 | TGTGGTTTAAATGCAGTGAGGGG | 120 |
| hs132686383 | GTATAACAAAGAAATAACCGTGG | 121 |
| hs132691243 | CAGGGTCAACAAGCTAACAGTGG | 122 |
| hs132691844 | ACCACAAACAGCACTCCACGTGG | 123 |
| hs132684425 | GACATCCAATGTGGTCTGTGGGG | 124 |
| hs132687714 | TGTGTGCAAAGGTAACAAAGAGG | 125 |
| hs132683904 | AAATGGCCCTATGCAGACAAGGG | 126 |
| hs132689023 | TTAGTAACAACCTAGTAACACGG | 127 |
| hs132691952 | GGATCAGAATTGAAACTGAGGGG | 128 |
| hs132692000 | GATGAATTCAACACACCCGGAGG | 129 |
| hs132692165 | ATGAATAGTGACCATGTGAGTGG | 130 |
| hs132693130 | GGTTGAGTGTTTATGCACAGAGG | 131 |
| hs132692978 | GCAAGAAAGATACAGTCTAGGGG | 132 |
| hs132693153 | ACTCTGTCTCTGTAATACTGAGG | 133 |
| hs132686520 | TAAGCCACAAGTGTAATGGGGGG | 134 |
| hs132687319 | AAAGCTTAAAGCTAACGGAGGGG | 135 |
| hs132694337 | GAATACGTAATTGAAAACCATGG | 136 |
| hs132693324 | GGGTAACAAAGTTAAAACCAAGG | 137 |
| hs132693986 | GTACATAAACTACCAATGGGAGG | 138 |
| hs132692198 | GTTGAAACCACATGTTGTGGAGG | 139 |
| hs132694406 | CTTCAGGTAGATGATGACAGGGG | 140 |
| hs132684128 | ACTACTTGAACACACCGCAGTGG | 141 |
| hs132684041 | TGGGACCCGCCTGTTCAGAGGGG | 142 |
| hs132693428 | AGACCCTACACTATGCAAGTGGG | 143 |
| hs132688850 | GATTGAGGGTAGAATGACAAGGG | 144 |
| hs132687303 | ACACTCACTCAATATCATAGGGG | 145 |
| hs132685186 | GAATGGCATAGAGCCCCCAACGG | 146 |
| hs132693008 | TGCTACCTATATATTCCCAGTGG | 147 |
| hs132689334 | AATGAGATAGGGATTCAACAAGG | 148 |
| hs132684482 | ATTTGGGTCAAAGAGAAGGGAGG | 149 |
| hs132688126 | TGGTCTTGTAGACTTACCCGAGG | 150 |
| hs132689750 | ATTGTGGCCAGCTCCCAGGGTGG | 151 |
| hs132688301 | TTTCAGCTAGAAATGAGCTGTGG | 152 |
| hs132690707 | ATGGTCATCCCATAGTACCAAGG | 153 |
| hs132694325 | TTATGAATGATATTCAACCACGG | 154 |
| hs132688352 | GCACTGCAGAGTTCCAGCAGAGG | 155 |
| hs132692070 | AGCTATAAGTGATTTAACAGGGG | 156 |
| hs132684543 | TATGGCAAACTAAAGAAAGGGGG | 157 |
| hs132684790 | GGACTTTGATGAGGACCATGCGG | 158 |
| hs132683980 | CACAAAGTTTGAACACATCGAGG | 159 |
| hs132688744 | CGGATGCTGGCCATAAACAGGGG | 160 |
| hs132687704 | AATTTGAAGAATAAGAACAGAGG | 161 |
| hs132692582 | TTGAGATACCAAAATAAACAGGG | 162 |
| hs132689530 | ACGAAAGCATGGTAGTTTGGGGG | 163 |
| hs132685501 | ATATAGTAAGAAACCCTGAGAGG | 164 |
| hs132692090 | TTATCCTAAAGCAATAGACAAGG | 165 |
| hs132685057 | TCAGCCGGGGAGCAAAACCAGGG | 166 |
| hs132691045 | AGAATGATCTGTAATCTCTGAGG | 167 |
| hs132689993 | AGAATTGCATAGTTATGACAAGG | 168 |
| hs132688078 | AAAACAGCATTGGTTCCAAGTGG | 169 |
| hs132691850 | AATCTAGGCAGCTATTCCAGGGG | 170 |
| hs132688469 | AAATAAGTAGTAAACAAAGGGGG | 171 |
| hs132687269 | ACCTTACAGTGCAAGCAGGGAGG | 172 |
| hs132689948 | AGATGATTACAAACAAACCAGGG | 173 |
| hs132690630 | TCACTACCAGGACCTTAGTGAGG | 174 |
| hs132690861 | ATAGCTATTAGGTCTATGTGAGG | 175 |
| hs132689879 | GTGGTGAGCAAGAACAGTTGAGG | 176 |
| hs132685189 | CCAACGGTACCAGCAATGTGGGG | 177 |
| hs132686308 | ATTTCAAACAGAAACCAGCAGGG | 178 |
| hs132684147 | TAAACACTGAGCCATGAGGTGGG | 179 |
| hs132686359 | TTGTCAATGGGTATGATACGTGG | 180 |
| hs132688977 | GGCTGGCTTGAAAATCAGGAGGG | 181 |
| hs132694162 | TCTCTATGGTAACAGACACAAGG | 182 |
| hs132691795 | TGACTGTTTAGGAGACACACAGG | 183 |
| hs132689131 | ATAACAGCAAGGGATAGGGAAGG | 184 |
| hs132685567 | CCATATTTTATAGAGAACAGTGG | 185 |
| hs132692790 | ATTCAATCACCTATACAATGTGG | 186 |
| hs132684558 | GGAAGATTGAGTGAATACACTGG | 187 |
| hs132686958 | ATGGGGTATGGTAAACCTGGAGG | 188 |
| hs132688973 | TTTCGCATAGACATCTGAGGAGG | 189 |
| hs132691044 | GGAGGCCTTATCAAACACCAGGG | 190 |
| hs132690439 | CCTGGAATTTGAAATATCCGGGG | 191 |
| hs132690818 | AAAACCTCAGTATGAAAACGGGG | 192 |
| hs132685239 | AAGTGATTGAAGGATGACAAAGG | 193 |
| hs132689450 | GGTAACCACAAAGTACCAGAGGG | 194 |
| hs132690736 | GAAGCCTGATGGAGATTAGGTGG | 195 |
| hs132683748 | TTGCTAATACTGATGACAAGTGG | 196 |
| hs132686015 | GATGTGGTATAAAAATTGTGAGG | 197 |
| hs132686527 | ACGAAAGGCATTATGGTAGGGGG | 198 |
| hs132693160 | TGATCCCTGAAATCCAGCAGTGG | 199 |
| hs132691006 | GGAGATGGCGCTAATCTGGGAGG | 200 |
| hs132689365 | TCTAGGGTGAAATTACACGCTGG | 201 |
| hs132694134 | ACAAGAACTAAATTTGCCAGGGG | 202 |
| hs132688730 | AAGGAAATAAAAGTATGGCGGGG | 203 |
| hs132689567 | TGATATCCAGCATAGATGGGGGG | 204 |
| hs132691976 | TCTACATTATGGAAACTCAGAGG | 205 |
| hs132686756 | TGAAGAGATAAAAACAAGCGGGG | 206 |
| hs132692645 | GAAAGCCATTCACCTCGAGGAGG | 207 |
| hs132692330 | AGGCCCTCAAATCTTCCTGGAGG | 208 |
| hs132689399 | GAAAACTTAGGAATTTACTGTGG | 209 |
| hs132685959 | ATTTTCCTAGCATATCTCTGAGG | 210 |
| hs132693504 | ATAATTGAGAATTAGTGCAGGGG | 211 |
| hs132694402 | CAGGGGGAAAAAAATCTTCGGGG | 212 |
| hs132687478 | GGAGAAAAAAGTACTCACAAGGG | 213 |
| hs132693775 | GCTTATATTAGCCAAAGCAGAGG | 214 |
| hs132686630 | AGCATGCTTCTTCACCACTGTGG | 215 |
| hs132685298 | ACACATAGATAGAACTCACACGG | 216 |
| hs132685330 | AAATTGAGATTAGAGCAACACGG | 217 |
| hs132689117 | GAACATGGCAGTTATAACACAGG | 218 |
| hs132687798 | ATATCAGGGCTATTGAGCAGGGG | 219 |
| hs132686189 | CCCCCAGTTAAAATGAACAGTGG | 220 |
| hs132689000 | TATTTATTGTTCCGACTCAGGGG | 221 |
| hs132690232 | AGTTACTCTCCCATTCGAAGGGG | 222 |
| hs132687956 | CATTGCTGTAACACAGACAAGGG | 223 |
| hs132689272 | TCTGGATCAGCATTCAACAAAGG | 224 |
| hs132691446 | AGTCCTCCCTGAGAATGTAGGGG | 225 |
| hs132687104 | TGTGACGACGATCATTGGTGGGG | 226 |
| hs132685245 | TACTCGATCCTACAAGTGCGTGG | 227 |
| hs132687374 | AGATGATGAAGTTTGGACAATGG | 228 |
| hs132693650 | GCCACAGGGACAGAAGTAAGCGG | 229 |
| hs132687494 | TAATAGCAAAGAGGTAAACGTGG | 230 |
| hs132684350 | TAAACAACCCTAAGGCAGTGAGG | 231 |
| hs132690753 | GTAAAAAAATAATTCTAACAGGG | 232 |
| hs132690298 | CAACACATCTCTTCATACAGAGG | 233 |
| hs132694401 | AATTGCATATAACTAATCTGGGG | 234 |
| hs132691551 | ATATAGTTCTTATAATAGTGGGG | 235 |
| hs132686150 | ATACCAAGTATGGTAACACATGG | 236 |
| hs132687025 | AATGAAATAAGTATAGAACATGG | 237 |
| hs132685246 | ACGCACTTGTAGGATCGAGTAGG | 238 |
| hs132685880 | AGCAAGGAGTAGATACAGGGAGG | 239 |
| hs132690686 | AGGGAGCATATAATACACAAAGG | 240 |
| hs132690438 | CTGGAATTTGAAATATCCGGGGG | 241 |
| hs132684212 | GCAGCAGTAACAAACGAACAGGG | 242 |
| hs132683807 | AAATAGTGCCCAATCCTAGGTGG | 243 |
| hs132689451 | TGGTAACCACAAAGTACCAGAGG | 244 |
| hs132690159 | GTTCCCATTAGTGAGGAATGGGG | 245 |
| hs132684260 | TTGCAGATTTAGATTAACTGGGG | 246 |
| hs132685059 | TATGTTCTGTACATCAGCCGGGG | 247 |
| hs132690276 | AGTCCTGCTATAGTCCTAGGAGG | 248 |
| hs132694068 | ATGACAACTGGAAACGTAGGTGG | 249 |
| hs132690916 | AAAATAGTATGAGCATGCAACGG | 250 |
| hs132687720 | AAAAACAAAACATATCACAAAGG | 251 |
| hs132688858 | TGACAATCATGGGAACGACAAGG | 252 |
| hs132688159 | TGCCAACCTGAAGAACGTGAGGG | 253 |
| hs132684399 | GATAAGCAGCTAACATGTGTCGG | 254 |
| hs132692272 | ATAATGTGAAGTAATATGCATGG | 255 |
| hs132686899 | TGTCTAAATTACTATTCACAAGG | 256 |
| hs132690382 | AAGGATTTAAAAATGGACTGTGG | 257 |
| hs132690474 | ACTTTTGATTGAATCCCAAGGGG | 258 |
| hs132692457 | CAGCCTCTGAGCCCTCAAGGTGG | 259 |
| hs132689320 | TGTGCCATAGAGCACTCTTGGGG | 260 |
| hs132687089 | GTGTCCTTGAAGGTGCATTGTGG | 261 |
| hs132684229 | GGTTCAGTGAAACCTTCGTGAGG | 262 |
| hs132689969 | AATAGTGCTATGCACACACAAGG | 263 |
| hs132689815 | CAATAAGTAAGCTTGTGAAGGGG | 264 |
| hs132686337 | AAAACAACGACGAAGTGGGGAGG | 265 |
| hs132688196 | CCTATTCTGAGCATGCCCAGTGG | 266 |
| hs132687490 | GTAAACGTGGCAGAAAGCAGGGG | 267 |
| hs132684310 | GCATATAAAGCAGACCCAAGAGG | 268 |
| hs132693134 | ATATAAAAGAGAATTTAGTGAGG | 269 |
| hs132692661 | AGGCCATTGAACAATTTGAGGGG | 270 |
| hs132686776 | GATATGATTCCTTCACCATGAGG | 271 |
| hs132685390 | GTATAATATCAAAAAGATGGGGG | 272 |
| hs132687439 | TATGGGTAAATATAAGAACATGG | 273 |
| hs132690966 | AACTCTCTGATGGAGTTGTGGGG | 274 |
| hs132691824 | GCGAAGCCACTACCCATGGGGGG | 275 |
| hs132688464 | ATATGTACTGAAAGCAACTGCGG | 276 |
| hs132690082 | AAGAAATGTTGGCTTGTAGGTGG | 277 |
| hs132686839 | ACAACGCATAAAGAGAACACAGG | 278 |
| hs132691575 | AATCTAAGTGGAAGTCCAAGGGG | 279 |
| hs132688947 | CCTTGTAGTTATCCCACATGGGG | 280 |
| hs132690881 | GGGTGACGTGCATATGTGCGTGG | 281 |
| hs132687149 | AGACATTTAATATATGCCCAGGG | 282 |
| hs132693609 | TAGGAGTTCAGAGCATGGTGAGG | 283 |
| hs132689128 | GATGTGGTGGATAACAGCAAGGG | 284 |
| hs132685420 | AAGATGGCGAATATTGACAAGGG | 285 |
| hs132691757 | AGATCCGAACAAACCATCAGCGG | 286 |
| hs132690960 | TAAGGGTGAGTAGTAACAGGAGG | 287 |
| hs132691924 | TCTAATCTCTGTAAGCCAAGTGG | 288 |
| hs132684712 | GCATCAATAGCTAATTCTAGGGG | 289 |
| hs132694065 | TACACCTGAAGGTAAATGGATGG | 290 |
| hs132692819 | TCTTCAGCTATGACCAGACGTGG | 291 |
| hs132691763 | ATAACAGCCAGAGTAATACCAGG | 292 |
| hs132684364 | AGTGAGAGCTAGAAGCCGTGTGG | 293 |
| hs132691725 | CATTGTGTAAAACAATATAGCGG | 294 |
| hs132692184 | TTGGTTGGTATTGATCAGAGAGG | 295 |
| hs132691556 | ACAAGATTGAGGAACAAAGGTGG | 296 |
| hs132686549 | TTAGAACCAAAAGTCGATGGAGG | 297 |
| hs132692419 | ATGTAATCTACGAATCATTGGGG | 298 |
| hs132693290 | CAATTTGTCAAAGCTGACTGGGG | 299 |
| hs132683441 | AGGGGTTAAAGATTACTGAGAGG | 300 |
| hs132687739 | TCTATGATGAAGGAAATGGTGGG | 301 |
| hs132684551 | TAGGATGTGATATCTGGCAGTGG | 302 |
| hs132689071 | AGAAACTTAACAGAAAAAGGAGG | 303 |
| hs132690425 | CCAGATCTGAGTCCTGTAGGGGG | 304 |
| hs132692748 | CTTAGGAGTAATTACCACGGTGG | 305 |
| hs132693208 | CCAAAGTTGGGCAAAGACTGGGG | 306 |
| hs132683725 | ACTTCCGTATTTGGTGAACAGGG | 307 |
| hs132692569 | TACAGGCCATGGGAATGATGGGG | 308 |
| hs132688774 | TGGGAGAGATTACACTCCCGTGG | 309 |
| hs132686587 | ATTAGTCATGGAGTCCTAAGGGG | 310 |
| hs132689161 | AGCTAAGCCACTGATTACTGTGG | 311 |
| hs132693190 | GATAATAGCTGAACATTACGTGG | 312 |
| hs132688165 | GCTTCATCAGAAACCTAGTGTGG | 313 |
| hs132690726 | TGAAGACTTTCGTCTCAGAGAGG | 314 |
| hs132687321 | GAAAAGCTTAAAGCTAACGGAGG | 315 |
| hs132686543 | AGCCGTTAGAGAAAGTGTTGTGG | 316 |
| hs132686677 | GAGGGTGAGGAAACTCACACGGG | 317 |
| hs132687746 | GGTAAGAGTTAGTTACACATGGG | 318 |
| hs132685845 | AATTACGGTGCTACAAGACGAGG | 319 |
| hs132684266 | GAGCTTCCACTAGGCCAGAGGGG | 320 |
| hs132684724 | CCTAGAATTGACGTTACAGGAGG | 321 |
| hs132692162 | ATGGAATGCAGTGTTCAGAGTGG | 322 |
| hs132690034 | GGAACAACAGGAAGGATTAGGGG | 323 |
| hs132694069 | AGGATGACAACTGGAAACGTAGG | 324 |
| hs132690361 | TTTCCACAAAGTTTTCCCAGTGG | 325 |
| hs132690142 | TGGTTGTGTCAACGAAGAGGAGG | 326 |
| hs132693649 | ATGTTGGAGCAATAGCCACAGGG | 327 |
| hs132693054 | GCTAGAAGTAGAAAAGCAGGAGG | 328 |
| hs132685703 | AAACGAATATTGGCGCCATGAGG | 329 |
| hs132684324 | TGATATGCTAAATAAAAGGGGGG | 330 |
| hs132692298 | AAATAAGGTGGGATCCAAGGTGG | 331 |
| hs132685844 | TACGGTGCTACAAGACGAGGAGG | 332 |
| hs132690766 | ATTGCGGTGCCTAAAGCTCGAGG | 333 |
| hs132685660 | AAGTTTCCTCCCTAGAGGAGGGG | 334 |
| hs132687767 | CATCCAAATACCCCTCATAGGGG | 335 |
| hs132692237 | GTCCAGAACATGTTACAACAGGG | 336 |
| hs132690048 | CCATGAAATGCACACCTGGGTGG | 337 |
| hs132693576 | GCCAATTATCTAATTCTCAGGGG | 338 |
| hs132690254 | CTATTAGTTAGACTTCCTTGGGG | 339 |
| hs132692646 | CTGGAAAGCCATTCACCTCGAGG | 340 |
| hs132690892 | ATATGCAAATCAGTATGGAGTGG | 341 |
| hs132691225 | ATACAGTACTAAACAGCCTGAGG | 342 |
| hs132690776 | GAGTAAGTATATTCATTGTGGGG | 343 |
| hs132693450 | GCTCAATCTACTAAGTAACCAGG | 344 |
| hs132687944 | AGCTTGTTGAGAGCCACACACGG | 345 |
| hs132690132 | ACATGGGCATATCAACAATGAGG | 346 |
| hs132689141 | TCAAAAGCAGGATCTTACAAAGG | 347 |
| hs132685645 | CCTCAATTAGAAAAATGCAGAGG | 348 |
| hs132690065 | GGTGTGTACACCTAATCCAAAGG | 349 |
| hs132684631 | ATAAACATGTGGTAGTGGTGAGG | 350 |
| hs132691280 | AATGCTTGTAATGGATGTGACGG | 351 |
| hs132687333 | CAAAACCCATCAACTATAGGCGG | 352 |
| hs132687477 | GAAAAAAGTACTCACAAGGGAGG | 353 |
| hs132692353 | GTTTATGCTCTCCCGCACAATGG | 354 |
| hs132694289 | TGGATTGGACAGACGCTAGGTGG | 355 |
| hs132692756 | AGATTGTTACGGAAGTTTTGGGG | 356 |
| hs132692863 | GTATGACAAGAGACATCCATGGG | 357 |
| hs132690943 | GTGACAAGCTTAGCGAACAGTGG | 358 |
| hs132694217 | TAGTACTTAAGTAGTATGGGTGG | 359 |
| hs132686953 | TTTCTCTTACACATTCTATGGGG | 360 |
| hs132693559 | CCTTTACTGAAATCAGACAAGGG | 361 |
| hs132684360 | CCTACCAAGAGAAGAAGAGGGGG | 362 |
| hs132689568 | GTGATATCCAGCATAGATGGGGG | 363 |
| hs132688082 | TAAATAAATATACTAACCAGTGG | 364 |
| hs132690533 | TGGTGCTTTAGACATTACCCAGG | 365 |
| hs132685901 | TCAAGCAACACTCACACGGGTGG | 366 |
| hs132688101 | AGTGCATACTCTAGTAGTGACGG | 367 |
| hs132691956 | ACGAAGGAGAAAATTCTTTGGGG | 368 |
| hs132684538 | AGAACTGGTAAACAACTGCAGGG | 369 |
| hs132687785 | ACAAACCAGGAAAAATGAGAGGG | 370 |
| hs132694405 | TTCAGGTAGATGATGACAGGGGG | 371 |
| hs132690112 | AGTCTTAGCCAAAAGCAGAGTGG | 372 |
| hs132686174 | TCACTTTTAGTGTTCCCCTGAGG | 373 |
| hs132689675 | TGATTACATTAGCTTCAGAGTGG | 374 |
| hs132686553 | GGAAAAAGATTCCAGAAAGGGGG | 375 |
| hs132690077 | ACGGGAAGCTCAGACAGCTGGGG | 376 |
| hs132692946 | GTGCCTATCCTAATAAGCAGGGG | 377 |
| hs132687052 | TACTAAGTGAATGGAAATGGAGG | 378 |
| hs132684124 | TCCATTATTTTTGACCACTGCGG | 379 |
| hs132690009 | GCAATATGGGAGGAAATTAGGGG | 380 |
| hs132693092 | AATTTTAAAAAGTTTCACAAGGG | 381 |
| hs132688933 | AATCCTTCTGATACAGAAGGTGG | 382 |
| hs132683301 | GAATAAATACTGTTATTCAGAGG | 383 |
| hs132693475 | GTAGATATATACATAAATGGGGG | 384 |
| hs132692372 | TAATTATGTGTCAACACCTGAGG | 385 |
| hs132694152 | CACTGAAGACTATAAAACTGAGG | 386 |
| hs132693536 | CATAATTCTCAAAAAGAGGGGGG | 387 |
| hs132688605 | CATTGATGATGCCTTGAGTGTGG | 388 |
| hs132694275 | TGGGATTTGAAGACTTCACGTGG | 389 |
| hs132687902 | ACAAGGGCAGTGATAAGGAGAGG | 390 |
| hs132694302 | ACTATGGTAACAAGAGAGTGAGG | 391 |
| hs132692001 | ATGAATTCAACACACCCGGAGGG | 392 |
| hs132684000 | ATTCTCAAGTGCAGTCACCAGGG | 393 |
| hs132691315 | ATTTATGGCATAATTACCAGAGG | 394 |
| hs132683560 | GCAGTATGATGAAGTGCAGGGGG | 395 |
| hs132685408 | TGTCTATTAAGCATCAACCTAGG | 396 |
| hs132691318 | TATAGCTGTATCATTTACTGAGG | 397 |
| hs132688107 | GTTACATTTAACCTTCACCATGG | 398 |
| hs132686513 | AGTTTTCTACCATAGACAAGGGG | 399 |
| hs132690064 | CTGACAGCCCATTAGAGACGGGG | 400 |
| hs132690041 | AATGGCACCATTATCCACCCAGG | 401 |
| hs132692217 | AATTCTTTCCCAGAACAATGTGG | 402 |
| hs132683561 | AGCAGTATGATGAAGTGCAGGGG | 403 |
| hs132686456 | TAAACTGCAGACACTTCCACGGG | 404 |
| hs132684593 | TAAAAAATGAGAGATAGGTGGGG | 405 |
| hs132692125 | ACACTTGAGAAGAAACTAGACGG | 406 |
| hs132693874 | GATGGAGTCAACATTTCCAAAGG | 407 |
| hs132692624 | ATAAATATCCTTGATGCCTGTGG | 408 |
| hs132688604 | GTGGAAAACAGAAGTCAATGAGG | 409 |
| hs132690481 | TGTGTGTGTATAGGTCTCATGGG | 410 |
| hs132685498 | ACTGAACAATTGGTATACTGAGG | 411 |
| hs132692326 | ATACAGATATAGCACATACCAGG | 412 |
| hs132691826 | ATGCGAAGCCACTACCCATGGGG | 413 |
| hs132692109 | TCATTTGCATGGCTCTACGTGGG | 414 |
| hs132688700 | GTATAAGACAGGGTACCTGAGGG | 415 |
| hs132689699 | GGGCTCACATTGTAGAAATGTGG | 416 |
| hs132690143 | ATGTGGTTGTGTCAACGAAGAGG | 417 |
| hs132685663 | CTGACAAGTTTCCTCCCTAGAGG | 418 |
| hs132686622 | GTGAAAAGTGATGTGAGACAAGG | 419 |
| hs132685752 | GTAATTTTGGTATATATACGTGG | 420 |
| hs132693717 | GTGCTCGGCATGAATGCAGTGGG | 421 |
| hs132683869 | GTCTGCTACATGAGGAACAGCGG | 422 |
| hs132687706 | AAATCAACACCGATAATACAGGG | 423 |
| hs132685225 | TCCTGCCTGATACAACCAGAAGG | 424 |
| hs132691463 | TGACTCATCACATCCTGGAGAGG | 425 |
| hs132683653 | CAGACAAATGGTCAAACACAGGG | 426 |
| hs132689941 | TGAACAAAAAGCTAAGAACTGGG | 427 |
| hs132687781 | TATTTCACAGTAGATATCCAGGG | 428 |
| hs132687783 | TGTGGTCTCACATACAAACCAGG | 429 |
| hs132693826 | AGGTCATGTGTAAGTCACAAAGG | 430 |
| hs132688758 | AAGCAACTAGCAATAGACAAAGG | 431 |
| hs132684215 | AAAGGCTGCCAGAGTAACACGGG | 432 |
| hs132689549 | ACATGACCTTACATACATCACGG | 433 |
| hs132692278 | ATTGCCTCTCATATTTACAGAGG | 434 |
| hs132683844 | TTGGCATTGTATAAACATCAGGG | 435 |
| hs132687584 | GGCCTTTGAAGAAATCACGCTGG | 436 |
| hs132692319 | GTGTTTCAAACACTACTGATGGG | 437 |
| hs132686754 | CTTGAAGAGATAAAAACAAGCGG | 438 |
| hs132694328 | CCTTGAAGCATACATTACCGTGG | 439 |
| hs132688081 | TCTTAATTAATGTTACTGAGAGG | 440 |
| hs132688978 | GGGCTGGCTTGAAAATCAGGAGG | 441 |
| hs132690988 | TCACAAAAAACGTTGTGTAGGGG | 442 |
| hs132690877 | AAAATACTCATGAAGTACCAAGG | 443 |
| hs132693471 | ATATGTGAGTAGAATACACTGGG | 444 |
| hs132691959 | ATCCTCCAGATTCATAACGAAGG | 445 |
| hs132690513 | ATTTAGACAACCACACTGAGAGG | 446 |
| hs132683557 | ATAATTCTCCCATCTAAGTGTGG | 447 |
| hs132688044 | ATTAGATGAAGAAAATCACATGG | 448 |
| hs132687378 | ACACGTGTTGGACGTTAGTGGGG | 449 |
| hs132690727 | AGGTACCTAATAGCAAGACCAGG | 450 |
| hs132692934 | AGTAAGAATTGAGATATGTGCGG | 451 |
| hs132694240 | GACCAACTAAAATATTGTCGTGG | 452 |
| hs132689036 | AATACATTAAAACCAGACAAAGG | 453 |
| hs132689339 | ATCTGGCCTAGGCTACATGTAGG | 454 |
| hs132688542 | AAATCAGTGATACATATCGATGG | 455 |
| hs132694252 | TCTGAAGAGCAACACCTGAGAGG | 456 |
| hs132690388 | GTAAACGACATACAAACTTGAGG | 457 |
| hs132690870 | TTAAAATCTAGAGTATTACAGGG | 458 |
| hs132686114 | GAAAGAATTTGAATACCAAGAGG | 459 |
| hs132694145 | ATTGAGAAAAAGTTGTCGTGGGG | 460 |
| hs132686478 | GTTATCAAAGTGTTAAACACAGG | 461 |
| hs132685730 | GTTGTATGATTGGATGTACTGGG | 462 |
| hs132687835 | ATGGCTGCATGATAATTAGTGGG | 463 |
| hs132693387 | ATACACGATGATCTAGTACAAGG | 464 |
| hs132687046 | GCAGTACTCTTTGTAGACAAGGG | 465 |
| hs132692877 | TGTGGGAGACATCACCACAATGG | 466 |
| hs132685312 | CATAACTAGAGAGGAAATGGAGG | 467 |
| hs132694257 | GCAGCTACTCTAGCTCATGTGGG | 468 |
| hs132684154 | CTAAAAAGTACAAGACTGTGAGG | 469 |
| hs132693256 | TGTAGCTTAGTCTCACAGCAAGG | 470 |
| hs132684554 | AGTGGTGATTCCAATCATTGGGG | 471 |
| hs132690013 | AGACACCTAATGCTAAAAGTGGG | 472 |
| hs132691063 | TGCACAACAAAAGCTTAACATGG | 473 |
| hs132691059 | GCTAGTGGGGAAGGACCGGGTGG | 474 |
| hs132689854 | ATCATCACCAAACCTAATCGAGG | 475 |
| hs132683413 | TCCTATGAATGACATACCTGCGG | 476 |
| hs132688454 | ATTTCACCTAAATTACACAAAGG | 477 |
| hs132689569 | TGTGATATCCAGCATAGATGGGG | 478 |
| hs132693589 | CATCCATAATCAGAGAAGGGAGG | 479 |
| hs132689464 | GATCCAAAGACCATTTCCCAGGG | 480 |
| hs132687951 | CCACATGTAAAAATCTCCAGAGG | 481 |
| hs132690167 | ATAATGACAGAGTGAAAGTGAGG | 482 |
| hs132694379 | GGGTTCTAAAAATCGTACGCAGG | 483 |
| hs132688825 | TCATATAATACCATAAGCTGAGG | 484 |
| hs132692979 | AGAAAGATACAGTCTAGGGGTGG | 485 |
| hs132693575 | GAAAATACTCAGTAAGACTGAGG | 486 |
| hs132687744 | TAGATTGAAAGCATTAACAATGG | 487 |
| hs132691943 | CAACCAGCAAAATAACCCTAGGG | 488 |
| hs132687498 | TTTGAAGGTTGACAACTAAGGGG | 489 |
| hs132692982 | GGGTGGACAGGTAAAGAACAGGG | 490 |
| hs132683465 | TGAAAGCATTTAAAAACTGGGGG | 491 |
| hs132683683 | CTGAAAAGAGGAAATAATCGTGG | 492 |
| hs132687953 | AGTAATTCTCTGTAGGCAAGCGG | 493 |
| hs132688972 | GCCTTTCGCATAGACATCTGAGG | 494 |
| hs132683610 | TGTTTGCACAATCTACCAGATGG | 495 |
| hs132690379 | ACTGTGTGTCCCGAAGAGATGGG | 496 |
| hs132692067 | GATTTATAATGATTACCAAGTGG | 497 |
| hs132690093 | TTGCCTTTGATGAAAATACGTGG | 498 |
| hs132690511 | AACCACACTGAGAGGAAAGGAGG | 499 |
| hs132683857 | GGTTCCAAAAAAAAGCAGAACGG | 500 |
| hs132694375 | TTATAATCCACTGATTGTAGGGG | 501 |
| hs132692966 | GGAGCTGCAGCTTTTCAAAGGGG | 502 |
| hs132691903 | TCTGCTGGATGAAAGAACACAGG | 503 |
| hs132688015 | GATTAAAAATCACCAAAACAAGG | 504 |
| hs132691624 | AACCATGCTTGACGCTAGGATGG | 505 |
| hs132691545 | AGTCTATATCAAAATATAGGGGG | 506 |
| hs132690529 | TATGTTTCTAAAAACAACCGTGG | 507 |
| hs132693056 | TTAAAATAACCATTATCACCAGG | 508 |
| hs132693121 | AATGTGACTTATGAGACTGAAGG | 509 |
| hs132691156 | ATTCACAATTGACCATTTCGGGG | 510 |
| hs132684629 | GTAGAAATGGAATAAACATGTGG | 511 |
| hs132689284 | TGTTTTGATAGCAATACCTGAGG | 512 |
| hs132687376 | TTAGTGTACTGAGAAATGAAAGG | 513 |
| hs132690518 | CAGTGTCCCTCTATGCTGTGAGG | 514 |
| hs132685707 | CTTTACAAAATGATAAACCCAGG | 515 |
| hs132693840 | TTTCCCTAAACTGAATGAGGAGG | 516 |
| hs132684656 | AAGTAAATCAGTCCATCACAAGG | 517 |
| hs132690453 | ATAAGGTTGTGCTTCCAGCATGG | 518 |
| hs132686615 | GATAGCTAGGCTAATTCCAAGGG | 519 |
| hs132685314 | GCACATTCACATAACTAGAGAGG | 520 |
| hs132687287 | GAGAAGCCAAAATCATAGCACGG | 521 |
| hs132688112 | ATGGCAGGAAGATTTATTGGGGG | 522 |
| hs132687130 | CTCCAAGCTAAAAATTCATGGGG | 523 |
| hs132688360 | TTCTAAACACGTATTCTGTGAGG | 524 |
| hs132693754 | GTTGGGTTAAGCAGTGACATGGG | 525 |
| hs132690566 | GCCATCTATTTAATAACACAAGG | 526 |
| hs132683517 | AGCCTGAAAATATAGCCAGAGGG | 527 |
| hs132686675 | AGTACCTAAAAGTGAACAGGAGG | 528 |
| hs132693990 | TGACCATGCAAACTTTCAGGAGG | 529 |
| hs132683438 | GAGAGAATAAAATAAAACGTTGG | 530 |
| hs132689647 | TTTTCAAATTTAAGCCAGAGGGG | 531 |
| hs132686213 | GGGAAGCTTATTGAAGACAGTGG | 532 |
| hs132694354 | CCAGTCTCCTCCATAGCCTGAGG | 533 |
| hs132685335 | AAAAAAATACAATGGTAAGGGGG | 534 |
| hs132693262 | ATTAGGCTAATACTGGTCTGTGG | 535 |
| hs132690162 | TTCCTCACTAATGGGAACTGGGG | 536 |
| hs132690059 | TGAACCTCTGTGATAACACTTGG | 537 |
| hs132686210 | TTATGAGGCAAATAATGAGGAGG | 538 |
| hs132692879 | CAGACAGTGATGTTTCATGTGGG | 539 |
| hs132693069 | GGTATTACCTGTAAAAACCAGGG | 540 |
| hs132688105 | GCATATGGTATGTGCTAGCGTGG | 541 |
| hs132694362 | TATCTTCACATGCTGTCATGGGG | 542 |
| hs132685043 | AAAATGTTAAGTACTGAGGGTGG | 543 |
| hs132688817 | AGTTTAAAGTGTCTTCTCAGTGG | 544 |
| hs132688684 | AATGCTACAGTAGTACAGCTGGG | 545 |
| hs132684366 | TGAGAGCTAGAAGCCGTGTGGGG | 546 |
| hs132687544 | ATAGTACAAAGATGTTCAGGAGG | 547 |
| hs132694195 | TAAACCCACGAAGAGAGAAGAGG | 548 |
| hs132688437 | AACCCAAACTGACATGTAGGAGG | 549 |
| hs132687658 | CACGCACAAGAGATGTGGAAAGG | 550 |
| hs132692655 | TCACAATGGGATGTACACTTGGG | 551 |
| hs132692654 | GCAGTGAGAAGAATATAGAGAGG | 552 |
| hs132689877 | TTTGGTTCCAGGTAATAAAGTGG | 553 |
| hs132693541 | ACTAACAGACTAATGGAAGGAGG | 554 |
| hs132687659 | TTTAGCACGCACAAGAGATGTGG | 555 |
| hs132691818 | CTACTGTGTCTGATATGTGGAGG | 556 |
| hs132684784 | TGAAAATAGAAAGTCCCGCATGG | 557 |
| hs132692008 | CCATTATTACAACACTCTAGAGG | 558 |
| hs132688987 | ATACACAAGAATCTTGGCAAGGG | 559 |
| hs132685559 | ATAACAATAATTAATACTGGTGG | 560 |
| hs132688671 | TCTGTTTTTTCCCCAAATTGCGG | 561 |
| hs132692115 | GGTTGATTGTAAATGTCCCAAGG | 562 |
| hs132683505 | GTGGTCAGCTTACAATGAGGAGG | 563 |
| hs132688690 | ATACAATAGACTGCAACCAAAGG | 564 |
| hs132684687 | GTAAAACTAACATTTACCTGTGG | 565 |
| hs132693573 | TAATTGTTTCAGTAGAACAGTGG | 566 |
| hs132687108 | GCTTGGCCTCATTAGCTCTGGGG | 567 |
| hs132688413 | ATCGTGTGTCTATATTTCAGAGG | 568 |
| hs132683617 | AATATATTACAACTTCCCGTGGG | 569 |
| hs132689807 | ACGCACAAACATAAAATCAGAGG | 570 |
| hs132686850 | AATGCATGTACAAACTAAGGAGG | 571 |
| hs132687906 | TATTTGAACTCCATGCCAGAGGG | 572 |
| hs132686336 | CTGAAAACAACGACGAAGTGGGG | 573 |
| hs132693102 | TTATATGTAAGTCTCTTCGGTGG | 574 |
| hs132688092 | CTGTGATTTTGTGAACACAATGG | 575 |
| hs132688936 | GATTGTTCTGATAACCCAAGAGG | 576 |
| hs132692246 | GTGGCACCCATCTTAATGAGAGG | 577 |
| hs132692037 | TAAGTTCAGGAGTTTTAACGTGG | 578 |
| hs132693376 | CAGATATATTCCTAGGAGGGTGG | 579 |
| hs132694299 | ACACAGTTTGGGGATTCCAGTGG | 580 |
| hs132691202 | CCAGCCAGTTCTCTAGACTGAGG | 581 |
| hs132692452 | TGTCTATGAAAAGGAGTAGGAGG | 582 |
| hs132686205 | CCAAAACATAAACATTCACAGGG | 583 |
| hs132692069 | TAGCTATAAGTGATTTAACAGGG | 584 |
| hs132689045 | ATAAGGTATTTATTACCACTGGG | 585 |
| hs132685276 | GTTTCTCAAAGAAAGACCCCAGG | 586 |
| hs132690222 | TATGAAATACTTTAACACCCAGG | 587 |
| hs132684644 | AGAGATTGATTGGTTGACAGTGG | 588 |
| hs132692053 | ACCTACATAAAAATAAGGGGAGG | 589 |
| hs132688396 | ATTACACACAAAATAGTGGACGG | 590 |
| hs132689496 | ATGCTCATCTCTAGGTATGGGGG | 591 |
| hs132693338 | CCATTACCACAATAGTCCAGTGG | 592 |
| hs132693550 | TGTAAAGGATTAGGTAACTGAGG | 593 |
| hs132689144 | GAGAAAGTGTGGAAAGCACTGGG | 594 |
| hs132690446 | ACCAACTTGAGAGAGAAGGCGGG | 595 |
| hs132693824 | TTAAATTAAGACCTCTGGGGAGG | 596 |
| hs132684280 | ACAGTTAACTAGAACTGCTGGGG | 597 |
| hs132692110 | AGAGCCATGCAAATGAGAGTGGG | 598 |
| hs132686460 | TAACTCTTAACCATTTTGAGGGG | 599 |
| hs132683989 | AGGGAATATGAAACCCCCATAGG | 600 |
| hs132691050 | GCAAAAACTCCCAAATGGTGAGG | 601 |
| hs132692199 | ACATGTTGTGGAGGAACTGATGG | 602 |
| hs132685384 | AATTACATCAACAAAAATGGAGG | 603 |
| hs132694270 | TAAAGCACTTCAGAAGACACAGG | 604 |
| hs132686017 | CTTAGCATAACCATAACCTAGGG | 605 |
| hs132689989 | GAAATGTCTAAAAATTCTGGAGG | 606 |
| hs132687190 | GGGCATTGCACCTTGCACAAAGG | 607 |
| hs132692216 | GAAAGAATTGAGACATTACTGGG | 608 |
| hs132692613 | GGGTATGGAGTGGATCAACATGG | 609 |
| hs132683363 | CATCTTCATAGACTTTATGGAGG | 610 |
| hs132694392 | TCAAAAGCTAGAAATTGATGAGG | 611 |
| hs132686432 | TCCTATATACTAGAGCCAGAAGG | 612 |
| hs132688483 | TCTAGTGGAGCAGTAACTGAGGG | 613 |
| hs132689914 | ATATATTTCGGAGACCCAGTAGG | 614 |
| hs132685586 | TATCCCTGAGAGTATATGAGTGG | 615 |
| hs132687241 | GCTACAATAATTGTTCTGAGAGG | 616 |
| hs132687184 | CCTTTAAATGAGCACAACTGGGG | 617 |
| hs132690260 | CATTGAGCACACTCTACAAGGGG | 618 |
| hs132686351 | GCATAACTCTCTCAGTCCAAAGG | 619 |
| hs132691241 | TCTAGTCCTCAGCATCATCAGGG | 620 |
| hs132686751 | AAGATTAAACATGAACCTGTGGG | 621 |
| hs132687550 | AATTATAGGGATAAACACCCAGG | 622 |
| hs132684436 | TTATTCCAATCCTAGAGTGGAGG | 623 |
| hs132693755 | ACGTAATGATGTCAACCAGTAGG | 624 |
| hs132693997 | CAGTGAAGATGAGCAACAGGTGG | 625 |
| hs132691394 | TTTCTCAGTTGGTATCTCTGGGG | 626 |
| hs132690280 | TACTGTATAAAAATAAACCAAGG | 627 |
| hs132684915 | TTTTCATAAATGAATTACTGGGG | 628 |
| hs132686106 | TTTTTTAAATTATATTCACAAGG | 629 |
| hs132686518 | TGTAAGCCACAAGTGTAATGGGG | 630 |
| hs132691626 | ATATTTTTCCTAGAAAAGCGTGG | 631 |
| hs132685910 | GTCTGATAAAACCATAACAAGGG | 632 |
| hs132693396 | ACCCTACGCATAAGAGCAGGTGG | 633 |
| hs132692949 | GCTACATACTGTAATCACTCAGG | 634 |
| hs132691100 | GATAATACCTACATAATACTGGG | 635 |
| hs132684367 | GAGAGCTAGAAGCCGTGTGGGGG | 636 |
| hs132688632 | AAAGCATGTATGTAATTGGGAGG | 637 |
| hs132688151 | ATAGGCAATAATATTATGTGAGG | 638 |
| hs132686408 | TATTATTTTATAGTTCAAAGGGG | 639 |
| hs132690757 | CTTGCCATGGAAAAAAATGGTGG | 640 |
| hs132684654 | TCTGTGCCCTTGAAGGCTAGAGG | 641 |
| hs132693143 | CTAGTTGATTATGATCCCCAAGG | 642 |
| hs132693643 | CGACAGACACCAAATGCCAATGG | 643 |
| hs132688776 | GATCTTACTTGATACTACCACGG | 644 |
| hs132683757 | CTATTGGCAATGTACACTGAGGG | 645 |
| hs132684038 | TACTAAACTCTACCACCCATGGG | 646 |
| hs132691096 | GCTAGAACCCAGCTAAGAGAGGG | 647 |
| hs132690424 | CCCAGATCTGAGTCCTGTAGGGG | 648 |
| hs132692395 | CATGTCATATGCTTTCCCATGGG | 649 |
| hs132690666 | AGGCAAAGGCTACATTGCGTAGG | 650 |
| hs132693040 | GATTATAGAAGTTTACATTGGGG | 651 |
| hs132690434 | CTGATGCCAGGATTCTGTAGAGG | 652 |
| hs132690890 | ACTGTTCGCTCAAGAAGTAAGGG | 653 |
| hs132684460 | AATGCTATGTGAGATAGGAAAGG | 654 |
| hs132692888 | AAAATGTGAATAGTTCTGAGAGG | 655 |
| hs132688783 | AATAAAATAGAGAAAAGACTAGG | 656 |
| hs132686683 | GCACTTAAGATGTTAGAGGGAGG | 657 |
| hs132684858 | CGAGACATAGTCTCTGCCAATGG | 658 |
| hs132685900 | AAATCAAGCAACACTCACACGGG | 659 |
| hs132687670 | TGTTAAACATCAATAGAGGGAGG | 660 |
| hs132684887 | CAATACTATTAACAACCCCAGGG | 661 |
| hs132694251 | TGAGCAGGGGAAGACACTATCGG | 662 |
| hs132687344 | GAAATTCTCAGATAATCTCAGGG | 663 |
| hs132690098 | TTAGCCTTGGAAGCTGTGTGAGG | 664 |
| hs132691640 | TCCGTTACACGTTTACAAAGGGG | 665 |
| hs132692360 | CTTGCCCCAATGCCATTGTGCGG | 666 |
| hs132683495 | AAAATGGCAGTGCAGAGTGGAGG | 667 |
| hs132683965 | TCTACCAATGCCGGGCTCCGGGG | 668 |
| hs132690353 | AATTCTGCTGAAATTAAGCAAGG | 669 |
| hs132684148 | AGTGTTTAGTCATATAGCAGAGG | 670 |
| hs132691510 | GACTAGATGACCATCAGAGACGG | 671 |
| hs132684901 | GAATAGAAAAAGTCTTACAAAGG | 672 |
| hs132687907 | CTATTTGAACTCCATGCCAGAGG | 673 |
| hs132683641 | GTATTTTTTTAAATTTTCAGGGG | 674 |
| hs132686256 | ATAATACATGCCAAGAGGGTAGG | 675 |
| hs132684973 | GTTTCCCACACACCTCTGGAAGG | 676 |
| hs132686841 | ATCGTCTTCCAAGAGTGTGTGGG | 677 |
| hs132689946 | ACAGTTAGCCATCCTTAGAGTGG | 678 |
| hs132686965 | TCCGGTTGCCGTGAATAGTGAGG | 679 |
| hs132687065 | TCCATGTCCTAGCTCGAGGGCGG | 680 |
| hs132688507 | ATCATCGCTGAGAAAAGGCAAGG | 681 |
| hs132684054 | GTATCTTGACCCTCTCTCAGTGG | 682 |
| hs132689830 | TTGTCAAGTTACCATGCCCGTGG | 683 |
| hs132691378 | TCATGTAGCAAGGAGTGCAGAGG | 684 |
| hs132685987 | ACATCGTTAGAAGACAGTAAAGG | 685 |
| hs132683620 | CATTTATACAGAAGACCCACGGG | 686 |
| hs132692259 | TTTGAATGTCTGGTATTGAGTGG | 687 |
| hs132685625 | GTAATTAAAAGTGCTTTAGGGGG | 688 |
| hs132690006 | CACAGAAATAGCAATATGGGAGG | 689 |
| hs132689932 | AATAATGTCAGAGATCGTGATGG | 690 |
| hs132685918 | TCATGTATCAGTAGCTTTGGGGG | 691 |
| hs132686386 | TGTTCCATAAGTATTGGGCACGG | 692 |
| hs132683843 | CTGATGTTTATACAATGCCAAGG | 693 |
| hs132683977 | TTTGAACACATCGAGGCAGGTGG | 694 |
| hs132691989 | ACTGACCTCTAAAACTTAGGGGG | 695 |
| hs132689465 | CCATTTCCCAGGGAACCAGTCGG | 696 |
| hs132692517 | GCTCTTCAAAGCAACATCTGTGG | 697 |
| hs132683959 | TTAATGTTAGTTGTTTGCCCCGG | 698 |
| hs132689723 | GCCTGTGCATACCAGATCTGTGG | 699 |
| hs132683458 | AATGATACTGGGCAAACTGAGGG | 700 |
| hs132691103 | AAATATGCATGATATTTGTGGGG | 701 |
| hs132691922 | GAATGACTCTCAGCCTAGGGTGG | 702 |
| hs132687669 | TATTGTTAAACATCAATAGAGGG | 703 |
| hs132688177 | GGGACCGAATAGACAATGCAAGG | 704 |
| hs132684217 | GTAACACGGGTGACAAATGTGGG | 705 |
| hs132683942 | GTCTTCTATGGCAAACCATGGGG | 706 |
| hs132683984 | TTGACACCCGTAGCCTATGGGGG | 707 |
| hs132686058 | TGACTGGACTATTCTTACAAGGG | 708 |
| hs132693379 | CCCTCCTAGGAATATATCTGTGG | 709 |
| hs132684980 | TTTCGTTGACCCTTAACTAGGGG | 710 |
| hs132687994 | CTTGAAAATTCAAATCCACAGGG | 711 |
| hs132685637 | TAGAGGGAGATAAAGGAAGGGGG | 712 |
| hs132684146 | CTAAACACTGAGCCATGAGGTGG | 713 |
| hs132686414 | GTAGATAATTATAACTCAGGAGG | 714 |
| hs132692738 | GTGATTAGAAGGCATTACATGGG | 715 |
| hs132688698 | GGTACCTGAGGGATCTGTGAGGG | 716 |
| hs132686979 | ACTGAGGTTACTGATTAGAAGGG | 717 |
| hs132685985 | GATCAGTGAAATTTACATTGGGG | 718 |
| hs132688255 | AGGCAAAGTGTCCTCTAGGGTGG | 719 |
| hs132691999 | ACAGATGAATTCAACACACCCGG | 720 |
| hs132691459 | CCAAATCCCCTACATTCTCAGGG | 721 |
| hs132685585 | TCAGGGATAAAATTCTGTAGAGG | 722 |
| hs132693564 | GGAGTGATAACATATTGCACTGG | 723 |
| hs132692047 | TCAATATTCTAGACATAGTGGGG | 724 |
| hs132685401 | ATAGTGCTGGGAATGCCAGAGGG | 725 |
| hs132685570 | GTCACAACCCTAGAAATGGGAGG | 726 |
| hs132693261 | AGGCTAATACTGGTCTGTGGCGG | 727 |
| hs132686997 | ATTTTTAAAGGTGTGTCTGGAGG | 728 |
| hs132687573 | TATATCAGTAACTTTAAATGGGG | 729 |
| hs132692230 | TATTGCACAGTTACATCTCAGGG | 730 |
| hs132689407 | GTACAAATGTAGGTATGAGGAGG | 731 |
| hs132686967 | ACTATTCACGGCAACCGGAGTGG | 732 |
| hs132692664 | TTCATCCTAAGGTCAATAGGAGG | 733 |
| hs132693001 | TCAAAAGAGAAAGAATCACTTGG | 734 |
| hs132683536 | TCTAGGGAGTGCATGAACAAAGG | 735 |
| hs132685481 | CCAAATAATAAGTAGAACCAGGG | 736 |
| hs132687593 | ACAACTTTTGACCAGTAGCGAGG | 737 |
| hs132684098 | GACCAACCGCTTCACCACACCGG | 738 |
| hs132690878 | GCAAGCACATCATTACTGAAAGG | 739 |
| hs132688721 | TGCGTCAAGATGCATCATGAGGG | 740 |
| hs132690324 | TGAATGCTATAGGAATAAAGAGG | 741 |
| hs132690348 | CAGCGTGAAAAAATCCTACAGGG | 742 |
| hs132683506 | ACCACTAACGTCACCTCAGGCGG | 743 |
| hs132692925 | AGTTGATCATCACATGCTTGTGG | 744 |
| hs132685131 | TGGCACCAAAGATTATAAGCCGG | 745 |
| hs132684414 | ATAGGCAGTTCAACTAAGGGCGG | 746 |
| hs132690640 | TGACACCAGCTGGACATCAGAGG | 747 |
| hs132687912 | AAACGCTGTACTCATCTAGAGGG | 748 |
| hs132685133 | TTATAATCTTTGGTGCCAGTAGG | 749 |
| hs132688912 | AAGAGTAATCATATCCCTAAGGG | 750 |
| hs132690785 | AAATGGATTGAATTTAGAGGAGG | 751 |
| hs132685235 | GATGGCCTGTGAATAGCTGTCGG | 752 |
| hs132684639 | TCTGCGTGCATTTTTTCCAGCGG | 753 |
| hs132686512 | CAGTTTTCTACCATAGACAAGGG | 754 |
| hs132692630 | TAGATCTGAAAAGTAAGGAACGG | 755 |
| hs132693339 | CATTACCACAATAGTCCAGTGGG | 756 |
| hs132688080 | GTAACATTAATTAAGAACCCTGG | 757 |
| hs132691988 | TACTGACCTCTAAAACTTAGGGG | 758 |
| hs132688627 | GCATGCAAGAGAATCAATAGAGG | 759 |
| hs132687473 | GAAAAGGAAACACTACTCCAAGG | 760 |
| hs132685584 | TCACCACTCATATACTCTCAGGG | 761 |
| hs132684401 | GTCGGTGCTTGAGAAGGTCATGG | 762 |
| hs132685338 | AGAAGGAGACTGATTTCCCAAGG | 763 |
| hs132693067 | AGCATGAGTTTCCTTCCAAGTGG | 764 |
| hs132690743 | GAGTATTAACAATAACACAATGG | 765 |
| hs132689479 | GGCATCTGAGTGAAATATGTGGG | 766 |
| hs132685402 | CATAGTGCTGGGAATGCCAGAGG | 767 |
| hs132688753 | GTGACCAAGCCTCTTGAGAGAGG | 768 |
| hs132691200 | CCTCAGTCTAGAGAACTGGCTGG | 769 |
| hs132686276 | GGAGTCATTAACTTTAGTGGAGG | 770 |
| hs132687522 | CCAACACCTAATTAATGACAGGG | 771 |
| hs132691506 | ACCTGTTGTAAAATATCGAGAGG | 772 |
| hs132687571 | TATACTTAATCTGTATGCCACGG | 773 |
| hs132691788 | TACTTTTTAAATTCTCAGTGAGG | 774 |
| hs132691435 | GCAGAGAGAAGACAGATAGGTGG | 775 |
| hs132692255 | GAGATGCAGGAATATTTGCAAGG | 776 |
| hs132689213 | GCTGCCACTACAAAAGAATGAGG | 777 |
| hs132691583 | GAAGTGCTTTTTATCCCAGACGG | 778 |
| hs132687774 | ATAAGTAAGGAATCAAGGTGAGG | 779 |
| hs132691332 | GTAAATGCAATAATGATATGGGG | 780 |
| hs132685672 | ACAATATTTAGCAATTACACAGG | 781 |
| hs132689601 | TCTATTTGTTAGATGACACAGGG | 782 |
| hs132690133 | TAAATATGAAAACCATACATGGG | 783 |
| hs132685211 | ACTATGCCCGTACATAAACCTGG | 784 |
| hs132693954 | AATTACTAATGAAAGTTGGGAGG | 785 |
| hs132688798 | ATCCTTAACTTGGAGTCCAGTGG | 786 |
| hs132685851 | GCAAAGCTCCTATTGTGGGAAGG | 787 |
| hs132684750 | ACAAAGTCTATTGTGATCAGTGG | 788 |
| hs132685657 | CCAATTCCCCTCCTCTAGGGAGG | 789 |
| hs132685991 | GCAGACCAGAGTAAATAACTAGG | 790 |
| hs132694169 | ATTCTTATTGTATTTCCATGAGG | 791 |
| hs132685947 | TTTGCTAAGGCAGCTCAGAAGGG | 792 |
| hs132688939 | GAGAGCTTGACACTGCATGCAGG | 793 |
| hs132689784 | GCCAAATTGATGCAAAGTGGTGG | 794 |
| hs132688462 | TCTCAGCTAAGGGACGACATAGG | 795 |
| hs132689501 | GCATGTTTATCAGTGTTACACGG | 796 |
| hs132687736 | GGAAATGGTGGGTTTTCCAGTGG | 797 |
| hs132693803 | ACTACATACTGAAGGATTTGGGG | 798 |
| hs132686726 | TAGGGCCCTAGAAACCTCCAAGG | 799 |
| hs132688934 | GGGAATCCTTCTGATACAGAAGG | 800 |
| hs132684437 | CTCTAGGATTGGAATAACACAGG | 801 |
| hs132691143 | TAATCAGCTGTCTATACCAGTGG | 802 |
| hs132691919 | TCGTCACCTACTCCCTTGAAAGG | 803 |
| hs132693491 | AGAGTACAAGAAGTAATCAAGGG | 804 |
| hs132691809 | ATACTAATAGAAGACAAACTAGG | 805 |
| hs132693845 | CTATGGTTAGTAATATTAGAGGG | 806 |
| hs132692064 | TCTGTAATAAAAAGTATGGGTGG | 807 |
| hs132684956 | GCAGAAATAATTCCATGATGCGG | 808 |
| hs132688938 | AGAAGCTATCTGATTACTGGAGG | 809 |
| hs132693799 | TGCAAAGTCTGCCAGCACACAGG | 810 |
| hs132692951 | TTGTGGTTATCTGATACAGGTGG | 811 |
| hs132684932 | AGTATGCAGATTTTAAGTGGTGG | 812 |
| hs132692441 | CGTTGTGAAAGAAATTTCCAGGG | 813 |
| hs132686295 | ATATGTAACACATTAAAATGTGG | 814 |
| hs132691930 | GTTTTAAACAAGACTTTAGGCGG | 815 |
| hs132689761 | TATTGTTGGAGGTTTCCTGAAGG | 816 |
| hs132686649 | CATTGTATATATAATAGAGAAGG | 817 |
| hs132689292 | TTTTGAGTGACTTTTTGTAGAGG | 818 |
| hs132694253 | CTCTTCAGAAAGATGAGCAGGGG | 819 |
| hs132688813 | TACTCAGATTCAAAAGAGAGAGG | 820 |
| hs132685911 | TGTCTGATAAAACCATAACAAGG | 821 |
| hs132690527 | TCACGCCTTGGCCTAAACAAGGG | 822 |
| hs132693756 | AATGCAGGTCAAAAGTGTGTGGG | 823 |
| hs132690038 | GGGAAATTGGAACAACAGGAAGG | 824 |
| hs132689013 | ACATAGCATTTGTGAGTGAAGGG | 825 |
| hs132688442 | GAAGTGTGAATAAAAGTTAGGGG | 826 |
| hs132691719 | CCCAACAGTCTAATAACGATAGG | 827 |
| hs132692653 | CAGTGAGAAGAATATAGAGAGGG | 828 |
| hs132685289 | TGCATTGGCAGTGACAGCGGAGG | 829 |
| hs132683588 | TGACCTACCTGAGAAAGAAGTGG | 830 |
| hs132685151 | GTCATATAGTGAGATGAGGATGG | 831 |
| hs132692466 | CAGCTACTCTACACGCAGCATGG | 832 |
| hs132694347 | GTAGCACTGTGTACACTGAAAGG | 833 |
| hs132689470 | AGTCGGGTCACAGGAAGAGTGGG | 834 |
| hs132684994 | TTATTGTCCATATAAATAGACGG | 835 |
| hs132692907 | TTTAATCAAAAATTTCAACCAGG | 836 |
| hs132690049 | TAAGTCCCTTCTTTAAACTGTGG | 837 |
| hs132691734 | AAGTCTAAGAACAAATCAGAAGG | 838 |
| hs132684810 | ACCATGCCCTCTACTGATGTGGG | 839 |
| hs132693300 | TTTGCATAAAATCTACCAGTAGG | 840 |
| hs132684478 | TTTAAAGTGGCACAAACAGAGGG | 841 |
| hs132684289 | ACGATGGAGTGCAGAATATGGGG | 842 |
| hs132683621 | TCATTTATACAGAAGACCCACGG | 843 |
| hs132686532 | ATTTATCAGTAGTTTAGGCGTGG | 844 |
| hs132687064 | AGTTCCATGTCCTAGCTCGAGGG | 845 |
| hs132684304 | AATTCTGCCTGAATACCAGAAGG | 846 |
| hs132690025 | TAAATATGCAACTCATGGAGTGG | 847 |
| hs132684072 | TGGAGGGCGACGCGCAGAGGCGG | 848 |
| hs132690639 | GACACCAGCTGGACATCAGAGGG | 849 |
| hs132686539 | AAGCAATTATGTCGATAACTGGG | 850 |
| hs132694019 | AGCCCACCAACTGAAATGAAAGG | 851 |
| hs132689218 | TCTTTTGTAGTGGCAGCCAGAGG | 852 |
| hs132684480 | GGAGGCACCAGTGTTTAAAGTGG | 853 |
| hs132688157 | ATGCCAACCTGAAGAACGTGAGG | 854 |
| hs132692858 | CATCTACCATTATTTCCACAGGG | 855 |
| hs132694155 | CTTAGGAATATGGAGCAATGAGG | 856 |
| hs132686982 | AGTTATTTCTAGAGGAACTGAGG | 857 |
| hs132686368 | ACACATCCTTGAAGAATGAGAGG | 858 |
| hs132691611 | TAAACTTTCACTCAAACCCATGG | 859 |
| hs132684542 | ATATGGCAAACTAAAGAAAGGGG | 860 |
| hs132684479 | GTTTAAAGTGGCACAAACAGAGG | 861 |
| hs132689771 | ACAGGAGCTCTAAGTCCAGTGGG | 862 |
| hs132690156 | TCCCCCAGTTCCCATTAGTGAGG | 863 |
| hs132690945 | ATTGTCCATTTACTGGACAATGG | 864 |
| hs132689271 | TTGTTGAATGCTGATCCAGAAGG | 865 |
| hs132693794 | CAAAGAGCGTAGGAATTCAGTGG | 866 |
| hs132683420 | GGTGGCTTTAGGTTAACTAAGGG | 867 |
| hs132685083 | AATGTTACATGAAAAATGAACGG | 868 |
| hs132691177 | GGATTAAATCATGAACAGGAAGG | 869 |
| hs132689113 | TGGTCTCTATATCAGTCGATGGG | 870 |
| hs132689037 | CATAAATTAATGCAAACGTGTGG | 871 |
| hs132686059 | GACTGGACTATTCTTACAAGGGG | 872 |
| hs132688833 | GTTGGAAAATAAGAGGGCAGAGG | 873 |
| hs132687820 | ATCAACCAGTAATTTCTGAAGGG | 874 |
| hs132683477 | AGAAAATGTATCTTTAAAAGGGG | 875 |
| hs132693864 | TTAGGAAGATTCTATGCACAGGG | 876 |
| hs132691409 | ACAATAGTTTACATTTACTGAGG | 877 |
| hs132684869 | GGCACAGCTACCAGGAAAAGGGG | 878 |
| hs132686329 | GGTAGCCAATTATGGCCCACAGG | 879 |
| hs132688319 | ATTGATTTGAATATACACTTCGG | 880 |
| hs132689361 | AGATGAGAAGATAGTCTTTGGGG | 881 |
| hs132694386 | CGAGAAATCATAGACCAGCTGGG | 882 |
| hs132684890 | TCTCTCTCAAAAGTACTGCAAGG | 883 |
| hs132690398 | ACTACTGTATAGGAACTACATGG | 884 |
| hs132690811 | ATATTTAAAATAAAAAGGGGAGG | 885 |
| hs132691084 | AATTTAGATCCCTTTCCAAGTGG | 886 |
| hs132689163 | ATATTTTCCACAGTAATCAGTGG | 887 |
| hs132690182 | TTGGGAATTTCAGTAGGCAACGG | 888 |
| hs132683472 | TTTTAAATGATATTTCCTTGGGG | 889 |
| hs132693720 | TGTATCTACTTGGAACTCGTGGG | 890 |
| hs132690200 | AGACAAATGAGAATGAGGAAGGG | 891 |
| hs132683914 | GAATTCACAAACACAGATAGGGG | 892 |
| hs132684972 | CACACCTCTGGAAGGAACACAGG | 893 |
| hs132692189 | GTGACTGATATGAATTCAAGGGG | 894 |
| hs132684435 | GTGTTATTCCAATCCTAGAGTGG | 895 |
| hs132694390 | ATATATCAATATCTCCTGCAGGG | 896 |
| hs132691699 | TTATTTTCTGGTTGGCACTGAGG | 897 |
| hs132691505 | TATTTTACAACAGGTATAAGCGG | 898 |
| hs132685065 | ACAGTCCTAGACACCCATAGAGG | 899 |
| hs132683743 | ATGCTAATAGATTATCCAAGTGG | 900 |
| hs132685754 | TAGACTATATTTGTAGCTGTGGG | 901 |
| hs132684881 | CATTCTCAAAAATTATATCGAGG | 902 |
| hs132689831 | GACAATGCCTGAGACTACCTGGG | 903 |
| hs132691509 | GGTCATCTAGTCTCTAATGAGGG | 904 |
| hs132689607 | GTCTAAGCTAGTACTAGGTGAGG | 905 |
| hs132690693 | TTGTTAGACCCATCTATGAGTGG | 906 |
| hs132686838 | ATATATGCTTCAATTTTGTGAGG | 907 |
| hs132691672 | GCTTATTAGGAAAATCACATTGG | 908 |
| hs132687671 | GTTAAACATCAATAGAGGGAGGG | 909 |
| hs132686457 | ACGAATTATTCATCTACCCGTGG | 910 |
| hs132683562 | GAGCAGTATGATGAAGTGCAGGG | 911 |
| hs132685549 | TGATTTAAGTGAGTGTATCAGGG | 912 |
| hs132686656 | CAGCATGGTTCAGTTGATGGTGG | 913 |
| hs132687762 | CTACTAGTAACACAATACTCAGG | 914 |
| hs132689429 | AAGCATTGTAAGGTACTACATGG | 915 |
| hs132693141 | TTTCTAAGAACTAGGCCTTGGGG | 916 |
| hs132690769 | GAAAGGAGAGAAGCTTTGAGAGG | 917 |
| hs132685158 | ATTTTACACCAGGTCGAAGGAGG | 918 |
| hs132687191 | ATGCCCAGAGCCATAAGGAGTGG | 919 |
| hs132690454 | AACCTTATATGTAGTGACCATGG | 920 |
| hs132687932 | TAACAAAAACTAGAACAAAGTGG | 921 |
| hs132686087 | ACAGGGACCATCCTATCCATAGG | 922 |
| hs132687511 | GGAAGAAGCTGGGAGTCCAAAGG | 923 |
| hs132683409 | TTTCTGCTACCAGTAGAAGTGGG | 924 |
| hs132687236 | TGATTTTAAAGAAATAGTAGTGG | 925 |
| hs132686122 | TCCGTGAGCCTAAAGAACAATGG | 926 |
| hs132683923 | TATACAAAACAAAACATGAGAGG | 927 |
| hs132689664 | ACTAAAATAGCTAACTTCAGAGG | 928 |
| hs132693429 | CCTACACTATGCAAGTGGGTTGG | 929 |
| hs132693815 | AGTAACACAAAGCAAAAATGTGG | 930 |
| hs132687643 | TGTCACTTTCATTTATTCGGGGG | 931 |
| hs132685919 | ATGACAGGTTTATATTCTGGAGG | 932 |
| hs132688371 | ATTGGCTTAGAAAACATGAGTGG | 933 |
| hs132688559 | TATACTTATATTCAAGCACAGGG | 934 |
| hs132690907 | AGAGTTCCCAGGACGCAGGAAGG | 935 |
| hs132684214 | AAAAGGCTGCCAGAGTAACACGG | 936 |
| hs132684464 | AAAGTAAGCAAAATTGAGGAGGG | 937 |
| hs132684352 | ACTCTTGATTTCACTGACAGAGG | 938 |
| hs132691373 | CATGAATAAATACATTCAAGAGG | 939 |
| hs132685233 | GTAGACCGACAGCTATTCACAGG | 940 |
| hs132685618 | TAACTCATAGTTATATAATGGGG | 941 |
| hs132691718 | CTAATAACGATAGGAAACAATGG | 942 |
| hs132684286 | ATTGCCTTCTTACCTGACGATGG | 943 |
| hs132693603 | TTTCATACACACTCATCATGGGG | 944 |
| hs132692241 | TCATTCAGAGATTATAACCAGGG | 945 |
| hs132689402 | ATTTACTGTGGCAACAGGAGAGG | 946 |
| hs132692218 | TGTCTGTGAGACAAAATGAAAGG | 947 |
| hs132691245 | TGTTGACCCTGATGATGCTGAGG | 948 |
| hs132689945 | TAGTGAGACCACTCTAAGGATGG | 949 |
| hs132688030 | CTACATAAACTCTATTCATGGGG | 950 |
| hs132690410 | GCTTTGGTGGGAAGAAGTAGAGG | 951 |
| hs132685053 | TCCCTTAAGACTTACTCTGACGG | 952 |
| hs132683657 | CACAGGGCCTGGATTATAAGGGG | 953 |
| hs132692211 | ACGCAGATTGTAATTAGAGGTGG | 954 |
| hs132686519 | GTAAGCCACAAGTGTAATGGGGG | 955 |
| hs132685879 | AATAGCAAGGAGTAGATACAGGG | 956 |
| hs132691274 | CCTTTAAGTAAGACAGCCAGGGG | 957 |
| hs132692017 | TTATACAAATAAATTTACAAGGG | 958 |
| hs132684024 | TCGAATGTGGATATCCCAAGAGG | 959 |
| hs132691855 | TGGGGACAACAGCAAAGTGGTGG | 960 |
| hs132685813 | ATTCAGGTTTGGGATCAGGAAGG | 961 |
| hs132694254 | GCTCTTCAGAAAGATGAGCAGGG | 962 |
| hs132688171 | GCGAAAACCAGAGCCACACTAGG | 963 |
| hs132690633 | ACTTCACATATGCCTCACTAAGG | 964 |
| hs132693858 | CATAAACTATTAGTGCCTGAGGG | 965 |
| hs132692903 | ATACATAGCCCATATGTCAAAGG | 966 |
| hs132688156 | GGAGAGCTGCAGCCTACATGAGG | 967 |
| hs132685154 | CCCTACATAATAGTATGCAAGGG | 968 |
| hs132688065 | ATAGTGTGGGTCAACTGAAGGGG | 969 |
| hs132694290 | GAATGGATTGGACAGACGCTAGG | 970 |
| hs132687102 | TCTGTGACGACGATCATTGGTGG | 971 |
| hs132683383 | TTCTTGTATTAAAGACGTAGAGG | 972 |
| hs132687513 | GATCGGCAAAGGAAGAAGCTGGG | 973 |
| hs132692054 | AATACCTACATAAAAATAAGGGG | 974 |
| hs132689844 | ATAAAATATCATGATGATGGAGG | 975 |
| hs132690839 | TTAATACTGCAATATAAGCAAGG | 976 |
| hs132692071 | ACTTATAGCTACGATCCACTTGG | 977 |
| hs132692225 | TCAGGGTAATGCTTAGAGGTGGG | 978 |
| hs132689410 | TTTAGCATAGTTGCAATGTGTGG | 979 |
| hs132692787 | ATTTTGGATTCTGGAGACAGTGG | 980 |
| hs132691712 | CCAGTTTCCAAAAAAGTCTGAGG | 981 |
| hs132691613 | ATAATTAGACAATTCAGAGAAGG | 982 |
| hs132685713 | AAAAGAACCTAAAGTACACAGGG | 983 |
| hs132683416 | AATGGACATATTTTCCCAAGTGG | 984 |
| hs132686270 | ATAAATTCATAGTCAATATGGGG | 985 |
| hs132688450 | TGGTGGCTTGAGGAAATGTGGGG | 986 |
| hs132685103 | GTGCTAACATGCAGTAGAGGAGG | 987 |
| hs132685741 | TTTTTTTTCAGTCAATCTAGAGG | 988 |
| hs132692171 | AGATGTCATTGGAAAAATGGGGG | 989 |
| hs132690692 | TGTTAGACCCATCTATGAGTGGG | 990 |
| hs132688422 | ACAGGATTGTTGATTGCCTGTGG | 991 |
| hs132692335 | AGACTATTGCCTTCATAGCGAGG | 992 |
| hs132686484 | GATGAATGATCACATTAGGAAGG | 993 |
| hs132685068 | ACAAGTGCTAGTGCGTGAAGTGG | 994 |
| hs132694335 | TCAGTAAATTAATTAGCAAGTGG | 995 |
| hs132690094 | TGCCTTTGATGAAAATACGTGGG | 996 |
| hs132692460 | CCTCCACCTTGAGGGCTCAGAGG | 997 |
| hs132686128 | AAAAAAAGAAACTTCCAAAGAGG | 998 |
| hs132690609 | TCCATAGACAATGAAGCCCATGG | 999 |
| hs132690536 | TGGCAATTAAATGTATCTCAGGG | 1000 |
| hs132686970 | ACACTCCCCTCTCACAGCAATGG | 1001 |
| hs132686255 | GTGTATAATACATGCCAAGAGGG | 1002 |
| hs132693432 | CCAACCCACTTGCATAGTGTAGG | 1003 |
| hs132685458 | GCAAGTCCAAAGGCATGTGATGG | 1004 |
| hs132693873 | AATTGTTTATGACTGTGGGATGG | 1005 |
| hs132685488 | ATACCTCAAAGGAAAATGGCCGG | 1006 |
| hs132693313 | GTAGAAGTACTATATATAGGAGG | 1007 |
| hs132691037 | ACTTTGCCTACACAAAAAGCTGG | 1008 |
| hs132690447 | AACCAACTTGAGAGAGAAGGCGG | 1009 |
| hs132687164 | TCAAGGGCTTGTGAAGATGAGGG | 1010 |
| hs132683514 | CAGAGGAGAAAAATGAGAAGAGG | 1011 |
| hs132691137 | GCAGACATATTATCTGATCAGGG | 1012 |
| hs132688218 | GACTGGCTAGACTAGGGCTAGGG | 1013 |
| hs132688520 | ACATACGGATGAATTCAGTAAGG | 1014 |
| hs132686340 | AAACAACATCTACCTGTAAGGGG | 1015 |
| hs132694098 | ATGAGAGCTTTATACTAAGACGG | 1016 |
| hs132694317 | TTTTGCATCCAAATGCTACAGGG | 1017 |
| hs132690147 | CATTTGAATAAAAGAATCTGAGG | 1018 |
| hs132688070 | TCAAATCCAGATGCTACCACAGG | 1019 |
| hs132691372 | ATGAATAAATACATTCAAGAGGG | 1020 |
| hs132686853 | AGCAATGTCAGCGAGCTTGGTGG | 1021 |
| hs132684822 | TACATTTTTTATGAGCCCCGTGG | 1022 |
| hs132686528 | AAAGGCATTATGGTAGGGGGAGG | 1023 |
| hs132686825 | TAGTTTTAATGGCCCAAAAGGGG | 1024 |
| hs132693400 | GCCAAGTGCCAAATGGTGCAGGG | 1025 |
| hs132690631 | TTAGTGAGGCATATGTGAAGTGG | 1026 |
| hs132683764 | TCACTGAGTTGAACTTGTAGAGG | 1027 |
| hs132691385 | TCTACTGCATATAACACTGATGG | 1028 |
| hs132689448 | AGGGCAAAAGAACTGTAGACGGG | 1029 |
| hs132689937 | TAGTACTTGGCATAAACAGTAGG | 1030 |
| hs132690247 | AAGTTAAAATGGCAACACCATGG | 1031 |
| hs132687995 | CTATCTTTTCAAGATCCCTGTGG | 1032 |
| hs132693374 | ACCACAGATATATTCCTAGGAGG | 1033 |
| hs132684166 | ATTTGCAGCCTTTTGTAGAGGGG | 1034 |
| hs132688954 | ATTTACGTATATTATGCCCAAGG | 1035 |
| hs132693919 | ATGGCAGAAGAACTAAAGGCAGG | 1036 |
| hs132690541 | ATAATGATTTCTGCATTGTGTGG | 1037 |
| hs132693880 | CTGTTTGTATGGCTAGGGTGAGG | 1038 |
| hs132687286 | TTTTGGCTTCTCTCCTAGGGAGG | 1039 |
| hs132684821 | ACATTTTTTATGAGCCCCGTGGG | 1040 |
| hs132694151 | AAGACTATAAAACTGAGGAAAGG | 1041 |
| hs132683849 | AATGCAATTACAATTATGCAAGG | 1042 |
| hs132686218 | TCTCTGTTGGAAGTGAATAGGGG | 1043 |
| hs132688732 | CAAAGGAAATAAAAGTATGGCGG | 1044 |
| hs132691048 | TCTGAGGTGAGAAGCTAGTGAGG | 1045 |
| hs132692274 | CTGCCCTCTGTAAATATGAGAGG | 1046 |
| hs132692222 | TATTCCAAGGGCCTACCGCAAGG | 1047 |
| hs132691095 | AGAACCCAGCTAAGAGAGGGAGG | 1048 |
| hs132690810 | TCTATATTTAAAATAAAAAGGGG | 1049 |
| hs132693796 | CTTGAGGCTGCAAAGAGCGTAGG | 1050 |
| hs132688644 | TCAATAAATTCGTAGCCCTAGGG | 1051 |
| hs132691918 | AAGGGAGTAGGTGACGAAGATGG | 1052 |
| hs132692093 | AGGTGTGTCTCAGGGTAGAGAGG | 1053 |
| hs132692973 | GGCCTTCCTTAGAATCTGCACGG | 1054 |
| hs132689197 | TTGAGAGTGATTGTTACCAAAGG | 1055 |
| hs132689346 | AAATATATATTCAATACCATAGG | 1056 |
| hs132687765 | CTCACAGTCGCCCCTATGAGGGG | 1057 |
| hs132686367 | GGACTGCTGAGTTTCTGTAGAGG | 1058 |
| hs132683824 | GAGTGGTTCCTTCATGACATGGG | 1059 |
| hs132689247 | AATGAAAGTTGTAACAGGAGAGG | 1060 |
| hs132691696 | TGACCACTAACTAAATCTGAAGG | 1061 |
| hs132691013 | GCCTAATCTAATTCATAGTGAGG | 1062 |
| hs132690102 | AGTGCTGACTTAAAGGGCAAGGG | 1063 |
| hs132690415 | AGGCAGCGATAAAAAAAACCTGG | 1064 |
| hs132685941 | TTGCAGTTTGTGTGGTTACGTGG | 1065 |
| hs132683369 | GAAAGTACGCATGCACATGTAGG | 1066 |
| hs132693142 | CTAGCCTGAGCCACACACAATGG | 1067 |
| hs132691008 | TGGGTCCCCATTAATTAGCAAGG | 1068 |
| hs132688306 | AGTAAGCCTTTGGATGGGGAAGG | 1069 |
| hs132684861 | ACTCCCAAAGATATATAAGTCGG | 1070 |
| hs132693488 | CATTTACTAGATAACAAACATGG | 1071 |
| hs132690249 | TTTTATAGCATGAAACCCCAAGG | 1072 |
| hs132687882 | TTTGCAAAACAATTTAAGAGGGG | 1073 |
| hs132693257 | ACAACGTGCTATTAGCAAGTAGG | 1074 |
| hs132686521 | GGGGGGATCTCCTAAACGAAAGG | 1075 |
| hs132689526 | TCCCTGACAACACGAAAGCATGG | 1076 |
| hs132688928 | ATCATCTCAAAGAACTACATGGG | 1077 |
| hs132693198 | GTAGGAAGGAAGGCAAACTAGGG | 1078 |
| hs132685643 | GGAATAAAATAAGAATGCGAAGG | 1079 |
| hs132689550 | CCTTACATACATCACGGAGTTGG | 1080 |
| hs132683894 | GAGCATCATGACCTTACAAGAGG | 1081 |
| hs132693522 | TTTCAAAGAAGGCTGACCACAGG | 1082 |
| hs132686879 | AGCTAGTTTTTTTTTCAGGGGGG | 1083 |
| hs132692889 | TGTCTTCTAGGGTACACTGTAGG | 1084 |
| hs132683625 | TCATTCTTTTGAGCATGAGGAGG | 1085 |
| hs132685063 | ACTATCAGCAATTAGTGAGAGGG | 1086 |
| hs132687268 | AGTACCTTACAGTGCAAGCAGGG | 1087 |
| hs132687512 | CGATCAGCTTTAAGGGACAGTGG | 1088 |
| hs132687637 | TATCTTTGATTGAGGGAAGGAGG | 1089 |
| hs132683670 | TGTAATCCAGAATGGCCCATAGG | 1090 |
| hs132689087 | AATCATTATTATCAACAGAAGGG | 1091 |
| hs132684332 | TTTTTTTACAAGGGAATGTGAGG | 1092 |
| hs132690600 | TAGAATTCAAGCAATTTGGAGGG | 1093 |
| hs132688260 | CTATTATTCAAAAGCCAGCAAGG | 1094 |
| hs132688240 | TCTTATAATAGGTTATTGGAAGG | 1095 |
| hs132684151 | GGGCTGCCAGGTAAATTGGAAGG | 1096 |
| hs132684413 | AGAATAGGCAGTTCAACTAAGGG | 1097 |
| hs132688927 | TGATCGATCTATGTTTTGGGAGG | 1098 |
| hs132692453 | GTGTGTCTATGAAAAGGAGTAGG | 1099 |
| hs132693397 | AGAACCCTACGCATAAGAGCAGG | 1100 |
| hs132685497 | TGTTCAGTTTTGGTGCAAGGTGG | 1101 |
| hs132689274 | TGTGCTAGCATAATCTCACTAGG | 1102 |
| hs132689793 | AAAAAGAGCCCCAATTTGTGGGG | 1103 |
| hs132690862 | GCTATTAGGTCTATGTGAGGTGG | 1104 |
| hs132683624 | AATCCTACTAATTATTAACATGG | 1105 |
| hs132691217 | AATGTAGTACATATCCCCATTGG | 1106 |
| hs132684224 | ATTTCTTAAAATCCTCACGAAGG | 1107 |
| hs132687758 | AGGTGAGAGCTGGCAAACACAGG | 1108 |
| hs132689720 | TTATTATAAAAGCAGGTCAGAGG | 1109 |
| hs132692815 | GGAAGGATCTGCGCTAGGTGTGG | 1110 |
| hs132684394 | GCATGTAGATTAGCCTCACAGGG | 1111 |
| hs132691005 | AGATTAGCGCCATCTCCCATGGG | 1112 |
| hs132694186 | TGAACATAGGGATATGAGAAGGG | 1113 |
| hs132689759 | TTCCTGAAGGAGACTTAGAACGG | 1114 |
| hs132686171 | TCCAAACTGATAAGTCCTCAGGG | 1115 |
| hs132685093 | TTTTAATCAAGTATATTCGGTGG | 1116 |
| hs132687606 | ATACACCTAATTGCTCTCTAGGG | 1117 |
| hs132684650 | TTTCAACCTCTAGCCTTCAAGGG | 1118 |
| hs132685025 | GCATAAGAGGACACTGCACATGG | 1119 |
| hs132685735 | CACATGATTGAGTATCTTAGGGG | 1120 |
| hs132691014 | GCTGTCCTTGCTAATTAATGGGG | 1121 |
| hs132686049 | CATTGTTGACTCAAGGACACTGG | 1122 |
| hs132694389 | GAGTTGTTGAAAAACCCTGCAGG | 1123 |
| hs132693131 | CTGTGCATAAACACTCAACCAGG | 1124 |
| hs132689188 | ACGCAAATTCTAGTTTAAAGCGG | 1125 |
| hs132690372 | ACACTCCACAAGTCAAAGATGGG | 1126 |
| hs132684239 | CCTGTTTGTTTCTTTCACTGTGG | 1127 |
| hs132690660 | ATCCAAGACTGAAATGGTAGGGG | 1128 |
| hs132692126 | CTTCTCAAGTGTCTAAGCTGAGG | 1129 |
| hs132691117 | AACATGTCATCTGGTAACCATGG | 1130 |
| hs132688000 | TTAGAAATAAACTAGCCAGAAGG | 1131 |
| hs132684296 | TATGGTTCTGAATTAGCACTCGG | 1132 |
| hs132687272 | AGGGAGGCATTATTGCTCAATGG | 1133 |
| hs132683596 | AATTCTGTGATTAAGTGGCAGGG | 1134 |
| hs132693427 | TAGACCCTACACTATGCAAGTGG | 1135 |
| hs132690161 | TCCTCACTAATGGGAACTGGGGG | 1136 |
| hs132685064 | AACTATCAGCAATTAGTGAGAGG | 1137 |
| hs132689622 | AGTTCACCTACATCTAAAGAAGG | 1138 |
| hs132693144 | CTGAGCCACACACAATGGATAGG | 1139 |
| hs132693110 | GGGTAATAGGAATATGGGATGGG | 1140 |
| hs132693081 | ATCCACACACTATTTTGAAGAGG | 1141 |
| hs132690899 | GGGAAAAAACGGATTGGAGTGGG | 1142 |
| hs132685594 | ACATATTTTAGTCAAATCAGAGG | 1143 |
| hs132683464 | GTGAAAGCATTTAAAAACTGGGG | 1144 |
| hs132686805 | GATATGTTTAATCAAAAACATGG | 1145 |
| hs132689143 | AAGTGTGGAAAGCACTGGGTTGG | 1146 |
| hs132687342 | AGAATGATCTGCTTAACACTTGG | 1147 |
| hs132694351 | TTTAGCTCCTCAGGCTATGGAGG | 1148 |
| hs132692816 | ATCCTTCCTCTCATAAATGAGGG | 1149 |
| hs132685101 | GTACAAATATTACATTAACATGG | 1150 |
| hs132683611 | GCATGTGTTAGATACAATGCAGG | 1151 |
| hs132692749 | TTAGGAGTAATTACCACGGTGGG | 1152 |
| hs132687336 | CGTGAGTCAGTAACCCCTGAAGG | 1153 |
| hs132694101 | GGAAAATATAAGTCAGAGGGAGG | 1154 |
| hs132686211 | ACATTATGAGGCAAATAATGAGG | 1155 |
| hs132690971 | GAATACTGGCCTTTACTGGAGGG | 1156 |
| hs132690653 | GCAAAATGGGTGTGGTAGCGAGG | 1157 |
| hs132693959 | AATTACTAATGAATGTTGGGAGG | 1158 |
| hs132685757 | ATTTCTTTAGGAGATACTCATGG | 1159 |
| hs132693655 | CTCCATATATTCTTTCAGTGTGG | 1160 |
| hs132691128 | TGTAACAAGAAACAAAGCTAAGG | 1161 |
| hs132691091 | AATGCTGCATGTCATATACCTGG | 1162 |
| hs132686455 | ATAAACTGCAGACACTTCCACGG | 1163 |
| hs132687846 | GCTAAAAGCCAGTGAGAAGACGG | 1164 |
| hs132688071 | AATCCAGATGCTACCACAGGAGG | 1165 |
| hs132687037 | TGAAAATTGAGAGTAGGGAACGG | 1166 |
| hs132686018 | AGCCCTTCTCTTAAGTAGCACGG | 1167 |
| hs132686856 | TGAAGGTTCAATAAATAGGTCGG | 1168 |
| hs132692425 | CCTCTGACTGTCCATGAGAGAGG | 1169 |
| hs132686089 | AGCTTCCTAGTGGCCACACAGGG | 1170 |
| hs132685308 | AAAAGCTTCACTGATCAAGATGG | 1171 |
| hs132691687 | CCATATTAGAAGCAAGTCCAAGG | 1172 |
| hs132684472 | ACTGATCGTGTTGCTGACAAAGG | 1173 |
| hs132687249 | CCTAAATATACAGTACATCAGGG | 1174 |
| hs132691864 | AACTTGGAAATAATTTTTAGGGG | 1175 |
| hs132687226 | ATAATCACTCACATTTCCCAAGG | 1176 |
| hs132690472 | AAAATAACTTTGGTAGACAGTGG | 1177 |
| hs132690519 | ATTGTACCTCACAGCATAGAGGG | 1178 |
| hs132683474 | AACATATTAACTAGCCCCCAAGG | 1179 |
| hs132688271 | TTTACTAGATCATCACCGGCAGG | 1180 |
| hs132684196 | ACACAGCACACACGAATGCATGG | 1181 |
| hs132687426 | TCTCTTTTTATAGTGGTGGGGGG | 1182 |
| hs132691684 | ACTCCATCCATTAGTAATCACGG | 1183 |
| hs132684813 | ATAATACCCACATCAGTAGAGGG | 1184 |
| hs132687760 | AGTATTGTGTTACTAGTAGAGGG | 1185 |
| hs132686881 | ACAGCTAGTTTTTTTTTCAGGGG | 1186 |
| hs132685726 | AGAAAAATGAAGTAGAGCAAAGG | 1187 |
| hs132688353 | AATAGACTGCTATCCTGCCATGG | 1188 |
| hs132692814 | TGAGAGGAAGGATCTGCGCTAGG | 1189 |
| hs132689511 | TCAATGGAGATTGGTGAGAGGGG | 1190 |
| hs132688646 | AAGTAAGCTGTCATTACCCAAGG | 1191 |
| hs132691449 | GGGAGGACTAGTTCTTCCTAAGG | 1192 |
| hs132687969 | AATGTACAAAAAAAATACAATGG | 1193 |
| hs132691051 | TTTTTGCTAGGAGAGAAAAGTGG | 1194 |
| hs132689127 | TGATGTGGTGGATAACAGCAAGG | 1195 |
| hs132688023 | ATTGATAGCAAGATTTCAAGGGG | 1196 |
| hs132686469 | AATTACTCCAAGAAATGTGTAGG | 1197 |
| hs132688366 | GTAGCTAAAAAGTCTTGTAGAGG | 1198 |
| hs132693537 | GCATAATTCTCAAAAAGAGGGGG | 1199 |
| hs132693126 | AGAACTAATCCTTTTCACCATGG | 1200 |
| hs132692111 | TAGAGCCATGCAAATGAGAGTGG | 1201 |
| hs132684183 | GATTCCCAAAAGTAAGTGAAGGG | 1202 |
| hs132686764 | ATTCGGAACACAGTTGAGAGAGG | 1203 |
| hs132688589 | GAGTATGGCTAATAATTCAAAGG | 1204 |
| hs132686931 | AGTCATCCAAATATATCCCAGGG | 1205 |
| hs132683429 | CATGTGCATATTAATAAGAGAGG | 1206 |
| hs132688854 | CCCTCAATCCCAATTCTGCAGGG | 1207 |
| hs132691742 | AGTGGAGAAAGGCATCTCTAGGG | 1208 |
| hs132687320 | AAAAGCTTAAAGCTAACGGAGGG | 1209 |
| hs132686633 | GCAGTAGTAGTAGTTGTACTGGG | 1210 |
| hs132685288 | CTGTGCATTGGCAGTGACAGCGG | 1211 |
| hs132683935 | GTTTAAATGCACAATGCCAAGGG | 1212 |
| hs132686629 | GTCAAAGTAGCATCTTGCTGTGG | 1213 |
| hs132688012 | AAATATCCATCTTTGTGGCAGGG | 1214 |
| hs132686692 | GATACTGCATGGAACTCGGGTGG | 1215 |
| hs132690478 | ATGCAGCAGCTGAATTCTGAAGG | 1216 |
| hs132689245 | GTTGTAACAGGAGAGGAGCTGGG | 1217 |
| hs132687592 | TCACACTGAGAGTACCGCTCAGG | 1218 |
| hs132686567 | TATTATAGCTCAATTTCACCAGG | 1219 |
| hs132690369 | TTATTCTAAAATAGATATGAGGG | 1220 |
| hs132690219 | AAGTATTTCATAATCTCTAGAGG | 1221 |
| hs132684096 | TCAAGACCGGTGTGGTGAAGCGG | 1222 |
| hs132684406 | GCAAGCTGGCAGTCTTTCAAGGG | 1223 |
| hs132691752 | GAAGCTTTCCTCATAACTGTAGG | 1224 |
| hs132692219 | TAGTCACTTGCTCTTCCTTGCGG | 1225 |
| hs132683306 | CCATGCCATCCACCCAACCATGG | 1226 |
| hs132687929 | CAGGGCCATCAGCTGCCTGAAGG | 1227 |
| hs132691230 | GGCCAGTGCAGAACACACCTGGG | 1228 |
| hs132686971 | GCAATGGTTTCTTCCCTCACCGG | 1229 |
| hs132693927 | GTACAGAAGTAGATCATGGAAGG | 1230 |
| hs132686109 | AACAAGCTTACTGATATAGAGGG | 1231 |
| hs132690938 | GGCGAAAGAATCACTGAGAGTGG | 1232 |
| hs132685464 | AGCCAGGCTACGGAGCAGCTCGG | 1233 |
| hs132692277 | TTGCCTCTCATATTTACAGAGGG | 1234 |
| hs132690355 | TATCATTACAAATATATGCATGG | 1235 |
| hs132686959 | TAGCCAAGCACAGATAAAGCAGG | 1236 |
| hs132688234 | AGTTTATCTCCTAAATATGAGGG | 1237 |
| hs132683667 | AACAATTGAGGAGCCCTACAGGG | 1238 |
| hs132684373 | ACCCTCCCCACACCCCCACACGG | 1239 |
| hs132688793 | ATTTTACTAATAGTGACAAGAGG | 1240 |
| hs132694358 | TTATTTGCTTGTTACCCTAGTGG | 1241 |
| hs132692945 | TGTGCCTATCCTAATAAGCAGGG | 1242 |
| hs132693981 | AAGGTCTCTAAAGATAGCATAGG | 1243 |
| hs132690651 | AGAGAATTGCAAAATGGGTGTGG | 1244 |
| hs132689366 | ATACATCTACTGCTAATGATGGG | 1245 |
| hs132685505 | AGTTACATATTAAACAGCTAAGG | 1246 |
| hs132686404 | TAGTTCAAAGGGGGATAGGACGG | 1247 |
| hs132691546 | AAGTCTATATCAAAATATAGGGG | 1248 |
| hs132689893 | GCTAAGTTCAAGTGAAGTAGAGG | 1249 |
| hs132686566 | CTATGTAGCCGAAAGTTCCAAGG | 1250 |
| hs132684340 | AAGATGGCATTGTTAGGTGGTGG | 1251 |
| hs132684403 | AGAAGGTCATGGAAGTTAGGAGG | 1252 |
| hs132692932 | AGATATGTGCGGCTAACACAGGG | 1253 |
| hs132689954 | CCATTCTCTAGACTTGCATAGGG | 1254 |
| hs132687147 | TTACTTTGTCAGTACTTCAGGGG | 1255 |
| hs132692316 | GTACTAGCCATCAAAATTTGGGG | 1256 |
| hs132688990 | GATTCATGCAAAACTAGACTAGG | 1257 |
| hs132693973 | GCCCTCCTTTGTAACCTCTGAGG | 1258 |
| hs132693302 | CATAAAATCTACCAGTAGGTGGG | 1259 |
| hs132691345 | AGTGCAACATGATTGGACATAGG | 1260 |
| hs132686548 | GCTTTAGAACCAAAAGTCGATGG | 1261 |
| hs132693976 | GACCTCAGAGGTTACAAAGGAGG | 1262 |
| hs132687628 | ATTGCTGTGCTAGATTACACTGG | 1263 |
| hs132689786 | TCAGCTTTGTAACTCCTCAAAGG | 1264 |
| hs132687749 | TTAGTGAACGTATTTCAACTTGG | 1265 |
| hs132685172 | ACCTTAAAACAAGTTACAGAGGG | 1266 |
| hs132689066 | CTTGCATCAGTTTCTAAACGAGG | 1267 |
| hs132688608 | ATGATGCCTTGAGTGTGGCTGGG | 1268 |
| hs132690687 | AACAAAGCCCAGAAGAATGAGGG | 1269 |
| hs132687899 | GAACTCAAGGTTTTCAACAAGGG | 1270 |
| hs132685457 | ACATTGAATGGCAAGTCCAAAGG | 1271 |
| hs132687834 | AATGGCTGCATGATAATTAGTGG | 1272 |
| hs132687435 | AGCTTCCTTTTACATCCAAGAGG | 1273 |
| hs132693352 | TAGGGCTTACTTATGATGCAAGG | 1274 |
| hs132688370 | TTGGCTTAGAAAACATGAGTGGG | 1275 |
| hs132694059 | TTATGAATACAAAGAGCTAAGGG | 1276 |
| hs132693534 | AATAATTGTAGTAGAAACCAAGG | 1277 |
| hs132685219 | AATGGGAGAAATCCAAGCATAGG | 1278 |
| hs132693708 | ACATCTTGAATGAAAACAAGAGG | 1279 |
| hs132689543 | ACTCCTAACCCTTTAGCCAAAGG | 1280 |
| hs132692116 | CTTAACTCTCTGTTGTGAGGGGG | 1281 |
| hs132690073 | TTAGTAGACGCTGAAGGGCAGGG | 1282 |
| hs132684646 | CCTCTTTGAGCAGAGATCAAGGG | 1283 |
| hs132688248 | CTAAGCCCGTGTCTATGAAGTGG | 1284 |
| hs132684677 | TTTAAATACTGAAGTTCACATGG | 1285 |
| hs132683370 | TCTGCCAAAAGCTCAATATGAGG | 1286 |
| hs132687309 | TGCACAGACATCTTACAACATGG | 1287 |
| hs132686944 | AGACATTTCAAATTCTGCGGAGG | 1288 |
| hs132692496 | CTGTAACTGGAGACAAGAAGGGG | 1289 |
| hs132692206 | CATAGGGAGGAATCCCACAATGG | 1290 |
| hs132685668 | GGCTGGTTAAAAGCTTTCAGAGG | 1291 |
| hs132686194 | GCCACTGTTCATTTTAACTGGGG | 1292 |
| hs132683790 | CCATAAAAAGAATGGTACAATGG | 1293 |
| hs132690509 | AGAGGAAAGGAGGTGACCTAGGG | 1294 |
| hs132689885 | ACTAATTAATACTTGCCAGTCGG | 1295 |
| hs132685602 | GTTCAATCCTATGATAATCAGGG | 1296 |
| hs132687661 | AACTCACAAATATTGTTGCAGGG | 1297 |
| hs132685744 | GAAATGGCTTCGGAGATACATGG | 1298 |
| hs132687889 | AATCAGGACAGTAATTTGGTAGG | 1299 |
| hs132683839 | TTGTTTGAGTAACCTAGCTGAGG | 1300 |
| hs132689760 | CCTCCAACAATAGCTCAAGCAGG | 1301 |
| hs132683718 | GTGAGTTATTGTAATAGCAATGG | 1302 |
| hs132689048 | ACATTCTGTTTTTATCCCAGTGG | 1303 |
| hs132683317 | GCATCTACATACTCTAACATGGG | 1304 |
| hs132690179 | TGGAGGCCTACAACCTCTGAAGG | 1305 |
| hs132693172 | GGAACCATTAGTACTTACAATGG | 1306 |
| hs132687867 | GAACATTTAATATATAGGAATGG | 1307 |
| hs132683831 | AAACCAGTATTTTCAAAGCGTGG | 1308 |
| hs132688743 | TCGGATGCTGGCCATAAACAGGG | 1309 |
| hs132689548 | GGAGGTAGCAGCAATAAGCTGGG | 1310 |
| hs132687398 | ACAAATTCCAATAAATGATGAGG | 1311 |
| hs132687165 | AAGCCCTTGAAGAGGAGTTGAGG | 1312 |
| hs132692346 | ACATGGGCAACAAATTAGATGGG | 1313 |
| hs132694165 | GCTGCTCAGGAACATCCTCATGG | 1314 |
| hs132684182 | GGATTCCCAAAAGTAAGTGAAGG | 1315 |
| hs132687526 | TGCCAGCATATGTAGTAAGTAGG | 1316 |
| hs132688757 | TATCCTTCACCTCTCTCAAGAGG | 1317 |
| hs132684883 | GCTGGGAATAGAAGATGTCAGGG | 1318 |
| hs132687897 | AGACTATTAAGAAGAACTCAAGG | 1319 |
| hs132685321 | ATGTAAACTAATAAAAACGTTGG | 1320 |
| hs132684322 | GTTGATATGCTAAATAAAAGGGG | 1321 |
| hs132687254 | AATTTATTCAGTATGTCACCAGG | 1322 |
| hs132688008 | TAGACTAAATTCAAAGACTGAGG | 1323 |
| hs132683891 | ATCATGACCTTACAAGAGGAAGG | 1324 |
| hs132684178 | TGATTTTTCATTGAACTCAGAGG | 1325 |
| hs132683964 | GTAGACATCTCACTGCTCATGGG | 1326 |
| hs132683585 | GAAAGAAGTGGCGTTTGCAGTGG | 1327 |
| hs132683924 | ATACAAAACAAAACATGAGAGGG | 1328 |
| hs132685426 | GTCTATTCATTCAGGCTAAGGGG | 1329 |
| hs132684351 | TGTATTTATAAACAACCCTAAGG | 1330 |
| hs132693233 | TGGGGAGAGGAATTGGTAAGGGG | 1331 |
| hs132693474 | TCTTGTACATCTTAACCTCAAGG | 1332 |
| hs132688930 | TAGCCACCTTCTGTATCAGAAGG | 1333 |
| hs132692993 | TTCCGATGATCCTTTAACTGTGG | 1334 |
| hs132690646 | ATGAAGAGACAAGCTTTCCAGGG | 1335 |
| hs132690259 | GCATTGAGCACACTCTACAAGGG | 1336 |
| hs132689772 | CACAGGAGCTCTAAGTCCAGTGG | 1337 |
| hs132694199 | GGAAAACAAGGTAAAGTGAGTGG | 1338 |
| hs132690050 | GGTGACCACAGTTTAAAGAAGGG | 1339 |
| hs132690729 | ACGGTGTTATCTTTAAAACCTGG | 1340 |
| hs132685909 | GACAAGCAGAACAATTTCAAGGG | 1341 |
| hs132684783 | CTAAGGGAACATCTTGCTGTAGG | 1342 |
| hs132691951 | TGGATCAGAATTGAAACTGAGGG | 1343 |
| hs132690190 | AAGATGTGAGCTATAAAAGAGGG | 1344 |
| hs132694137 | GCCTGAAATTGGTAAGAGGACGG | 1345 |
| hs132685661 | CAAGTTTCCTCCCTAGAGGAGGG | 1346 |
| hs132694062 | TATGTTGCAATTTGAAGACAGGG | 1347 |
| hs132686612 | AATTCCAAGGGACTTTTGAGGGG | 1348 |
| hs132683829 | GATACAGTGAATTCACAGCTTGG | 1349 |
| hs132685242 | CTGTTCAGTAAGTGTCTGCAGGG | 1350 |
| hs132693528 | AAGTCAACAACATACATGGATGG | 1351 |
| hs132687657 | TCTTGTGCGTGCTAAAGCATAGG | 1352 |
| hs132690119 | CAAAACAAAAGCCAAGAAGAGGG | 1353 |
| hs132688191 | TGCCCAGTGGTGGGTCAGAGGGG | 1354 |
| hs132690494 | CCAAAATTGATAGAAAACATTGG | 1355 |
| hs132690226 | TAATATGCTGTAATATATGAGGG | 1356 |
| hs132691254 | GATAATATCAAAGACTCTTGGGG | 1357 |
| hs132688099 | GTCACTACTAGAGTATGCACTGG | 1358 |
| hs132692564 | GCCATAGGCCATCTCCATAGTGG | 1359 |
| hs132693079 | CACCTCTTCAAAATAGTGTGTGG | 1360 |
| hs132683546 | ACACATATGTATATATCAGAAGG | 1361 |
| hs132692847 | TTTCTATAATCTATTGCCAAGGG | 1362 |
| hs132685169 | ATAAGAACATACATAGCCAAAGG | 1363 |
| hs132685305 | GCTTTGTGAAACAATTGGCAAGG | 1364 |
| hs132690962 | ACTCCATCAGAGAGTTCTGTAGG | 1365 |
| hs132687560 | AGGATAGCTTACTTATACAGGGG | 1366 |
| hs132690532 | CTTTGTTACATTTAGAACCACGG | 1367 |
| hs132688246 | TTTTCCCACTTCATAGACACGGG | 1368 |
| hs132693371 | ATGAAGTTCTACATTGAACTGGG | 1369 |
| hs132683473 | TTTAAATGATATTTCCTTGGGGG | 1370 |
| hs132687076 | CAGAAGTTACTGACTTGAGGAGG | 1371 |
| hs132683755 | TCTGTACTAAGATCGGTGACAGG | 1372 |
| hs132690683 | TAATACAAAGAAATTGCAAGTGG | 1373 |
| hs132685694 | TGAGAGATGAGCAAATAGCCTGG | 1374 |
| hs132690953 | GGGCTGAAGCCCATGCTGAGGGG | 1375 |
| hs132686673 | TGAACAGGAGGTGGATCGAAAGG | 1376 |
| hs132694103 | TTCAGGAAAATATAAGTCAGAGG | 1377 |
| hs132688577 | TTTAACATCAGAAAGAACGTTGG | 1378 |
| hs132688277 | ATAGAGAATTTTTAACACCTAGG | 1379 |
| hs132683580 | GTGGAGGCAAAGGAACAGACAGG | 1380 |
| hs132690431 | TCAACACAGTAACTGATGCCAGG | 1381 |
| hs132685374 | AGAACTCTGCTCAAGCTGAAAGG | 1382 |
| hs132684474 | CACATAATAATACTATCTAAGGG | 1383 |
| hs132689489 | ATAAACAAATACATATCTAAGGG | 1384 |
| hs132685648 | TGTTTGTTGCCAGGAAACACAGG | 1385 |
| hs132686409 | ATTTTGGTAAAATATGGTGAAGG | 1386 |
| hs132693460 | GGAGCTTGCAAAGGGACTGTAGG | 1387 |
| hs132689816 | TTATTGTTGGCTTTAAAAGGGGG | 1388 |
| hs132686476 | TAGAATAAATCTGAGCTAGGAGG | 1389 |
| hs132690503 | ATCTCATACACCTTTTGCTGGGG | 1390 |
| hs132685666 | CCAAAGCCAGTTTACTTCTGGGG | 1391 |
| hs132688364 | CTCTTACTCATAGTGATAAGGGG | 1392 |
| hs132688935 | ATTGTTCTGATAACCCAAGAGGG | 1393 |
| hs132687063 | AAGTTCCATGTCCTAGCTCGAGG | 1394 |
| hs132693813 | CCCAATTGTACTGTGCAGCATGG | 1395 |
| hs132690017 | TCATTAAATTGGAGATCGAAAGG | 1396 |
| hs132684265 | GGAGCTTCCACTAGGCCAGAGGG | 1397 |
| hs132689997 | TACAGTAGTCAGTTGAAATGGGG | 1398 |
| hs132685451 | TAGCTGGTAGATTAAAGCAAAGG | 1399 |
| hs132692962 | TTTCAAATAGAAGCTAAGAAGGG | 1400 |
| hs132685662 | ACAAGTTTCCTCCCTAGAGGAGG | 1401 |
| hs132688106 | GTATGTGCTAGCGTGGATGATGG | 1402 |
| hs132689154 | ATTTCTGGTTCATATAAAGGTGG | 1403 |
| hs132685979 | CCCTTTCACTGGTATTAGGGAGG | 1404 |
| hs132692447 | CTGAGGGTGGGAAAATGCCATGG | 1405 |
| hs132685112 | TTTATACTAACTATGGGTGGGGG | 1406 |
| hs132689054 | AACACTATCTGGCTGCCTGAGGG | 1407 |
| hs132689850 | GTCTATCACTCAAGGTACAAAGG | 1408 |
| hs132692308 | GTGTAGAAACCATTCTGCCAGGG | 1409 |
| hs132683353 | TTATTCACCCTTGTCAACAAAGG | 1410 |
| hs132685954 | TATTATTTTTTACATTCTGGAGG | 1411 |
| hs132692947 | CTATCCTAATAAGCAGGGGATGG | 1412 |
| hs132693977 | TCAGACCTCAGAGGTTACAAAGG | 1413 |
| hs132690669 | CAAGGAAGTTCAGAGATGTAGGG | 1414 |
| hs132684058 | GTACTCAATCCTTTGATGGAAGG | 1415 |
| hs132692428 | TGAGAGAGGCCAGACTTGCAGGG | 1416 |
| hs132687702 | GAAATGTGTACAAAGTTAGGAGG | 1417 |
| hs132693587 | ACTACATCCATAATCAGAGAAGG | 1418 |
| hs132689560 | TCACATTCCAAACCCAGCCTAGG | 1419 |
| hs132687538 | TGTTAATTGGAGGTTGACAAGGG | 1420 |
| hs132687015 | TTATATGCTTTGATCAGATGGGG | 1421 |
| hs132684780 | ATCTTGCTGTAGGCAGCCTGGGG | 1422 |
| hs132686192 | CCACTGTTCATTTTAACTGGGGG | 1423 |
| hs132694312 | AAAGTAACATTGGCCAAAGAGGG | 1424 |
| hs132687041 | TTTCATTTGGAGAGAACAGGAGG | 1425 |
| hs132683543 | TTGATTGATAAGTTATGCCAGGG | 1426 |
| hs132686130 | AGAGGAGATATTACCCCAGAAGG | 1427 |
| hs132693234 | TTGGGGAGAGGAATTGGTAAGGG | 1428 |
| hs132694202 | CTACTGAAATCATACACTAACGG | 1429 |
| hs132689394 | ATCATACTCTAATTCACAGAAGG | 1430 |
| hs132694154 | TTAGGAATATGGAGCAATGAGGG | 1431 |
| hs132692514 | ATTTAAACCACAGTTCTCAAAGG | 1432 |
| hs132684155 | TATTCCCTTCTCAACAGCCTAGG | 1433 |
| hs132694214 | TGCAGCCTAACAGATAAAGATGG | 1434 |
| hs132694039 | TGATGGACACATTAGTGAGTAGG | 1435 |
| hs132691773 | TTGAAGATGGGCGCTTCCAAAGG | 1436 |
| hs132689168 | TTTCACAGCAATACATTTTGGGG | 1437 |
| hs132692997 | TACCACAGTTAAAGGATCATCGG | 1438 |
| hs132693584 | AATGTATTAGTACTGTTGTGTGG | 1439 |
| hs132687576 | ACTTAACAATTATTATCTAGGGG | 1440 |
| hs132694037 | CTAATGTGTCCATCACATGCAGG | 1441 |
| hs132691666 | GACCATCTCTACATACAGAATGG | 1442 |
| hs132685513 | ACATCTAAGATATCCCAATACGG | 1443 |
| hs132684033 | TTACGCCTTTTAGAAGAGGAGGG | 1444 |
| hs132689696 | TATGCAAATTAATTTTTCAGTGG | 1445 |
| hs132688740 | TTTTTGAAAGAAGGACTAGTCGG | 1446 |
| hs132688221 | TCTGAAGACTGGCTAGACTAGGG | 1447 |
| hs132685293 | GGAGGTATTGTACTTTGCCAAGG | 1448 |
| hs132694418 | CCAAAATCTAACGCAGCACAAGG | 1449 |
| hs132690800 | GGAGAGAGAGACATGTACCTTGG | 1450 |
| hs132686743 | CTTTTGGTTAAAGAGTAATGAGG | 1451 |
| hs132688389 | TTGCAAATTGTTATAGACCAAGG | 1452 |
| hs132689132 | CCATATGTCATTATTAGCTGCGG | 1453 |
| hs132692745 | GTCTTGTGCAGTATTAGTAGTGG | 1454 |
| hs132684940 | GATATTGTAGGCATATTCGATGG | 1455 |
| hs132684358 | TGCCTACCAAGAGAAGAAGAGGG | 1456 |
| hs132693443 | TCTGCTCAGATCATTCAAAAGGG | 1457 |
| hs132685447 | ACTCAATTAACTATTCAGACTGG | 1458 |
| hs132693651 | CCACAGGGACAGAAGTAAGCGGG | 1459 |
| hs132688891 | AAGTGATTACACCTTGTACTGGG | 1460 |
| hs132686652 | ATACCTACTCCTCTTTGCTAAGG | 1461 |
| hs132691599 | TATCTGAGCTGTTACAAAAGTGG | 1462 |
| hs132691655 | GGGTTTCTGGAGACCGAGAAGGG | 1463 |
| hs132692585 | TCTACATCACGATAATATGTTGG | 1464 |
| hs132684836 | TAACTTCCATTGCCTATCAGTGG | 1465 |
| hs132687924 | GTCTTCTTTTAAAAATACAAAGG | 1466 |
| hs132683411 | GGAATTATCATCTCAGCCGCAGG | 1467 |
| hs132692220 | CACTTGCTCTTCCTTGCGGTAGG | 1468 |
| hs132684957 | ACCTGTTTACTACAAATCAAAGG | 1469 |
| hs132690772 | TTTTAAGGCATTCTGTAGTGAGG | 1470 |
| hs132691417 | TTTCTCGTGTTCAAGAGGCATGG | 1471 |
| hs132685624 | TATTTATTATAGGATGTGAAAGG | 1472 |
| hs132684812 | ACCCACATCAGTAGAGGGCATGG | 1473 |
| hs132684961 | GCTGACACAACTTTGTCCCCAGG | 1474 |
| hs132684588 | TTAAATTCAAGTCTCTCGAAAGG | 1475 |
| hs132689457 | CAGCAGTCCTCAGTAACTCAGGG | 1476 |
| hs132685396 | ATGTATGTGTGCGTGTACATAGG | 1477 |
| hs132693939 | ATACAGGTTTAAATATTGCATGG | 1478 |
| hs132686762 | TTCGGAACACAGTTGAGAGAGGG | 1479 |
| hs132694359 | AATAATCTTTATCACCACTAGGG | 1480 |
| hs132685977 | AGGGAGGAGATATCAAAAGATGG | 1481 |
| hs132691242 | CTGAGGACTAGATGGCAGAATGG | 1482 |
| hs132688158 | ATATGACTGAACTTAAAGGCTGG | 1483 |
| hs132684968 | TGTTCCTTCCAGAGGTGTGTGGG | 1484 |
| hs132689594 | TACACCTGCTTTTAGAACAGTGG | 1485 |
| hs132693507 | ATATAATTGAGAATTAGTGCAGG | 1486 |
| hs132692078 | ATAAGGACCAGAAGGTGAAGTGG | 1487 |
| hs132687759 | GAGTATTGTGTTACTAGTAGAGG | 1488 |
| hs132690847 | TTTTAATATCTAATTCAACATGG | 1489 |
| hs132685184 | ACTAATCTTAGGAAGCTGGCTGG | 1490 |
| hs132685159 | GGAATTTTACACCAGGTCGAAGG | 1491 |
| hs132692616 | GCCTGTCAGCGATACTACCTGGG | 1492 |
| hs132692323 | ATACCAGGAATCTCAGTCATGGG | 1493 |
| hs132687686 | TAGAGGGCTGATAATAACCTTGG | 1494 |
| hs132689604 | GCATCTTGAATTTTTAAAGGAGG | 1495 |
| hs132685421 | ATATTGACAAGGGAATGAAATGG | 1496 |
| hs132694182 | AATTCTAAGCATAAAGCTGAGGG | 1497 |
| hs132693375 | CCACAGATATATTCCTAGGAGGG | 1498 |
| hs132687676 | TTAACGTTATAATTTTTACAAGG | 1499 |
| hs132689007 | AAAAGCTTCGGCTTCATACGTGG | 1500 |
| hs132693831 | GGTATGATAGTTACCCTACATGG | 1501 |
| hs132690230 | AGAGTTACTCTCCCATTCGAAGG | 1502 |
| hs132683888 | TTTCCATCTCTCATTCAGATGGG | 1503 |
| hs132691223 | TGAATCCTGCTTTTTCAAGGTGG | 1504 |
| hs132692200 | ATCAGTTCCTCCACAACATGTGG | 1505 |
| hs132683662 | ACAAAAAAAAAAAAAAACAATGG | 1506 |
| hs132689243 | CGGATCATGATGAAAGCCACAGG | 1507 |
| hs132690289 | TCAAACTCAGTTAATGGAGGCGG | 1508 |
| hs132683376 | TTTGAAGTGATTTAATCTAGAGG | 1509 |
| hs132689977 | ATAAAAAGCAAAGAGAACATAGG | 1510 |
| hs132692306 | AATTAGTCTATAGGATAAGGTGG | 1511 |
| hs132693154 | AGACAGAGTCTGGGTCCCCATGG | 1512 |
| hs132692531 | GAAAACCATATACAAAGCATAGG | 1513 |
| hs132687910 | CATTCAAAAATACATGAACAGGG | 1514 |
| hs132692892 | GATAGGAGAATATAGACTGTAGG | 1515 |
| hs132694045 | TGAAATTGTATGGGTTTTAGGGG | 1516 |
| hs132684825 | TATATACATAATATAAGCCATGG | 1517 |
| hs132692798 | AAACAGGGTTTAATAGGTGAGGG | 1518 |
| hs132684172 | GAATAGGAAAAGAACAACTAGGG | 1519 |
| hs132686027 | TGCTTTTCAAAGGTGTGTGGAGG | 1520 |
| hs132693557 | TTAATAAAGTTTCTACAGAAGGG | 1521 |
| hs132688387 | TTACTGGAGAACCATGCAGTAGG | 1522 |
| hs132685074 | CTAAGATAAAATGTGACAGTAGG | 1523 |
| hs132688875 | CTCGAGAAGCCGCAAAACCAAGG | 1524 |
| hs132688404 | CTACATTGGCTAAGGAGCCAAGG | 1525 |
| hs132686707 | GAAAACTTATACATTTAAGTGGG | 1526 |
| hs132683515 | AATAGAATTAATATCTGCAGAGG | 1527 |
| hs132687551 | AATCTATTAAATGAAGTCCTGGG | 1528 |
| hs132684202 | TCTATGAATTTGCTATGCACCGG | 1529 |
| hs132684625 | CTGAATATTCTATCAAAGCAAGG | 1530 |
| hs132684648 | CCCTTGATCTCTGCTCAAAGAGG | 1531 |
| hs132690865 | TTCTGGAAAACTTAGCACGTTGG | 1532 |
| hs132690030 | TGTATTTTTATGTAGCGCGTGGG | 1533 |
| hs132686023 | TGCCGTGCTACTTAAGAGAAGGG | 1534 |
| hs132691871 | GAAATATGTCAAACAACTGGAGG | 1535 |
| hs132690523 | CTCACAGTGCAAGATACAAAGGG | 1536 |
| hs132692128 | TGAGGACGTGTGCAACGGGATGG | 1537 |
| hs132685348 | TAACACCTGCTGCTATGAAGAGG | 1538 |
| hs132688135 | TACACGAAACTGATGTCCAATGG | 1539 |
| hs132684423 | TTCTTCCCCACAGACCACATTGG | 1540 |
| hs132691625 | ATGTAACCATGCTTGACGCTAGG | 1541 |
| hs132690885 | ACTTGGGCTCTTAGAAAGTAGGG | 1542 |
| hs132687725 | AGTTTTCACAGAGAGCAAAAGGG | 1543 |
| hs132685541 | TAATTGTTATCAGTTGTACAAGG | 1544 |
| hs132692014 | GCCTATGGAACAATACATGTTGG | 1545 |
| hs132693839 | GCATTTCCCTAAACTGAATGAGG | 1546 |
| hs132687887 | TCCTGATTGTGGGAAATCAGAGG | 1547 |
| hs132684874 | AAATGAATAATCTTTTGCTAGGG | 1548 |
| hs132684157 | TCATCCTAGGCTGTTGAGAAGGG | 1549 |
| hs132685914 | TTTATATTAATAATCAAGAGTGG | 1550 |
| hs132687193 | TACTCAAGCACCTTTGTGCAAGG | 1551 |
| hs132687619 | TGTTCTTGCTATAAAATGTGTGG | 1552 |
| hs132689892 | TACTTCACTTGAACTTAGCAGGG | 1553 |
| hs132684746 | GTGCAAAATATGTTTGGCAGGGG | 1554 |
| hs132692561 | GTAGCATACCACTATGGAGATGG | 1555 |
| hs132689882 | AACTTACCACATAATCCGACTGG | 1556 |
| hs132687888 | CCTGATTGTGGGAAATCAGAGGG | 1557 |
| hs132689352 | AGTCAATGCTTATATGGGAAAGG | 1558 |
| hs132691804 | GCTTTAATAAGAGAAACCTCTGG | 1559 |
| hs132683893 | CTCTATATCTGCAAACTCAAGGG | 1560 |
| hs132688355 | ATTTGTATTAAGCGAAGCCATGG | 1561 |
| hs132691923 | ATCTTATGACACACCACCCTAGG | 1562 |
| hs132692077 | TAAGGACCAGAAGGTGAAGTGGG | 1563 |
| hs132689115 | GTTAATTTATTTCAGGAACATGG | 1564 |
| hs132690760 | ATGAAAACTTAGCCTTGCCATGG | 1565 |
| hs132687142 | TGTATGCTTACACTGTGTGTGGG | 1566 |
| hs132693418 | AAAATTGTACCACCAGTACAAGG | 1567 |
| hs132686901 | AAGTTTTTAATCAAAGAAGACGG | 1568 |
| hs132688421 | TCTAGCACAACAGGGTCCACAGG | 1569 |
| hs132691938 | GGCAGGTCCTAGTTTACCCTAGG | 1570 |
| hs132690375 | CCACAAGTCAAAGATGGGTGGGG | 1571 |
| hs132688888 | GATGAACAATCCAGATATAGGGG | 1572 |
| hs132691921 | CTAGAATGACTCTCAGCCTAGGG | 1573 |
| hs132692118 | ACTTAACTCTCTGTTGTGAGGGG | 1574 |
| hs132690322 | AGCAAATGACATGGAGTACAGGG | 1575 |
| hs132692609 | ATAGCTCATTAGCTCAATGAAGG | 1576 |
| hs132689208 | ACAAATAGCTGAGAGTTGGTGGG | 1577 |
| hs132693752 | AATGATGTCAACCAGTAGGATGG | 1578 |
| hs132687080 | AAGAAATTAGCTCTTGGCCAGGG | 1579 |
| hs132688832 | CACTGTGTTGGAAAATAAGAGGG | 1580 |
| hs132684261 | AAACGAAAGGAGCTTCCACTAGG | 1581 |
| hs132686993 | TTCTTCTCCTAGCATCACACAGG | 1582 |
| hs132685403 | GAGCTGTCAGTCATAGTGCTGGG | 1583 |
| hs132689179 | CATATCTTGTAAATATACTAGGG | 1584 |
| hs132692280 | CCTGAAAGCAAAATAAAATGTGG | 1585 |
| hs132693207 | AGTTGGGCAAAGACTGGGGTAGG | 1586 |
| hs132683739 | GAGAATACAAAAGAAATCCTGGG | 1587 |
| hs132693802 | CATACTGAAGGATTTGGGGTTGG | 1588 |
| hs132688258 | ACAAATACATAAATTTGGCAGGG | 1589 |
| hs132684152 | TTACCTGGCAGCCCACCTCATGG | 1590 |
| hs132687166 | ATCTTCACAAGCCCTTGAAGAGG | 1591 |
| hs132688336 | CTGAGGGATTGGAAGAGTCAGGG | 1592 |
| hs132687808 | TTTCAAATATCATTACTCCCTGG | 1593 |
| hs132689095 | TGTTGTATCTCTGTTCGTTGTGG | 1594 |
| hs132693814 | TCATCACTAATAGAAAATGATGG | 1595 |
| hs132692398 | ACACTACAATCATATATATGTGG | 1596 |
| hs132686523 | AGATCCCCCCATTACACTTGTGG | 1597 |
| hs132687466 | AGAAAGAAGTAGCAAATGCAAGG | 1598 |
| hs132686473 | TTCAAAATAATGAGCACTAGAGG | 1599 |
| hs132693798 | GCAGAGTACTACTGAAGTTGAGG | 1600 |
| hs132693192 | AGTATAAATCAACTGCGCATTGG | 1601 |
| hs132691934 | AGATTACACATGTTGTTAAGGGG | 1602 |
| hs132685097 | GTTCTTACTTCGTAGAATGGTGG | 1603 |
| hs132691493 | TTAATAGAACTAGAGAATCAGGG | 1604 |
| hs132692880 | TCAGACAGTGATGTTTCATGTGG | 1605 |
| hs132683889 | CTTCCCATCTGAATGAGAGATGG | 1606 |
| hs132687430 | GGGAGAAATGAGTAAAAATGTGG | 1607 |
| hs132687525 | AATTTCTATGAATTTCAAGTGGG | 1608 |
| hs132687115 | ACAGGGACTCTCTTCTAGTAGGG | 1609 |
| hs132693200 | GCAAGGACATGTAGGAAGGAAGG | 1610 |
| hs132688312 | ACAGTGAGAGTTGGATAGAGAGG | 1611 |
| hs132685267 | TCATATGTTCACTAGTACTGAGG | 1612 |
| hs132683315 | AAGGAATAATCATTTCTCCATGG | 1613 |
| hs132692223 | AGGATTTGTCAATATTCCAAGGG | 1614 |
| hs132694226 | ACATACTTTTCAGATAACATTGG | 1615 |
| hs132684871 | CAGGAAAAGGGGTTCAAGAAGGG | 1616 |
| hs132693866 | TTCAGCCAAAAGTAAAGAAGAGG | 1617 |
| hs132688304 | GGCACAGTAAGCCTTTGGATGGG | 1618 |
| hs132684985 | TTTTAAGTAAAAGGGACACCTGG | 1619 |
| hs132686637 | GGATTTAGTGTCAGATATGGAGG | 1620 |
| hs132691701 | CTATGGCACCTTCAGTGATAGGG | 1621 |
| hs132686562 | ATCCTGGCAGAAAACTATGCTGG | 1622 |
| hs132690520 | TATTGTACCTCACAGCATAGAGG | 1623 |
| hs132694006 | TTTTCCACATCACTCACACTAGG | 1624 |
| hs132684052 | AGGTAGAAGCCACTGAGAGAGGG | 1625 |
| hs132690184 | ATCACTCGTTCAAAATACTTGGG | 1626 |
| hs132685179 | AGGTAGCTAAGTATTAGGAAGGG | 1627 |
| hs132686083 | ACTATAACCTATGGATAGGATGG | 1628 |
| hs132691907 | ATATTGGAACTTACTCTGCTAGG | 1629 |
| hs132693974 | GGTTACAAAGGAGGGCTGAAAGG | 1630 |
| hs132689105 | CCTAGTATCTTGATAACCCCAGG | 1631 |
| hs132692802 | CTTTTATATGTTTAGCCTAGAGG | 1632 |
| hs132691606 | TCATGCATATGATTACAGAAAGG | 1633 |
| hs132684387 | ATAGTGCCCAACCAGAGCAAAGG | 1634 |
| hs132687103 | CTGTGACGACGATCATTGGTGGG | 1635 |
| hs132690982 | AAGAGAATTACGTTAAGGGATGG | 1636 |
| hs132684582 | AATACTGTAGGTTAAGAAAGTGG | 1637 |
| hs132694196 | AAACCCACGAAGAGAGAAGAGGG | 1638 |
| hs132691555 | TGGACAAGATTGAGGAACAAAGG | 1639 |
| hs132691151 | AGGATGGTATCAGGTTAGCTTGG | 1640 |
| hs132691572 | TCATATTTAACAAATCTAAGTGG | 1641 |
| hs132686074 | TAACATGAAAAAATTGGTAGGGG | 1642 |
| hs132688053 | TTGTTATTAGCCACAAATCAGGG | 1643 |
| hs132687935 | TAGAACAAAGTGGCAGGCATGGG | 1644 |
| hs132692094 | AGACCACCCTAAAAATCACCAGG | 1645 |
| hs132685041 | CCTTAAAATGTTAAGTACTGAGG | 1646 |
| hs132686645 | GATCAGTCAGAGTCCAGGCTTGG | 1647 |
| hs132683368 | GCACATGTAGGAAATATAAGTGG | 1648 |
| hs132691113 | TAGTATCATAATCTTTACCATGG | 1649 |
| hs132685485 | TTATCTGTATACAAATTCACCGG | 1650 |
| hs132692028 | TTTCTATCACAGATTTACATGGG | 1651 |
| hs132687457 | AAGCACTGAGAATTAGGGATAGG | 1652 |
| hs132690172 | ATCCAGACTACTAAGAACATTGG | 1653 |
| hs132691609 | AGTATTGACAGTCTGACCATGGG | 1654 |
| hs132694072 | TGAGCAAACGTTTATAGAGGAGG | 1655 |
| hs132688475 | CAAGGGCATCAAGTAAGAAGAGG | 1656 |
| hs132692409 | GAAAGAAACTTAACTAGCAGTGG | 1657 |
| hs132692728 | AGATGTATTTTTAAGCTAGGAGG | 1658 |
| hs132693182 | GGATGAGTAACTTTTGAAGGAGG | 1659 |
| hs132691642 | ACTCCGTTACACGTTTACAAAGG | 1660 |
| hs132685175 | GGTTAAACGGAAGCAAAAGTAGG | 1661 |
| hs132689488 | TTATTGTTCTAGCAGCAAGAAGG | 1662 |
| hs132694331 | TCTGTTTTGAAAAATAGTCAAGG | 1663 |
| hs132689800 | TTACAATATATTGAGTACACTGG | 1664 |
| hs132691632 | ACACCTGTCATCTCAAAAGAAGG | 1665 |
| hs132688769 | GCTCATTTAGGTAGTTTGAGTGG | 1666 |
| hs132690903 | TTGAACTCCTAATTAGAGGATGG | 1667 |
| hs132687664 | CCATATTCTTAAGACAACTTGGG | 1668 |
| hs132684834 | CCACATCCACTGATAGGCAATGG | 1669 |
| hs132689460 | AACAGACTCTTAAGCAGCAGTGG | 1670 |
| hs132687915 | TGAAACATATAAGTTATGACAGG | 1671 |
| hs132687627 | AGTGTAATCTAGCACAGCAATGG | 1672 |
| hs132690894 | CTTTTCATGACTCTATCTGGTGG | 1673 |
| hs132691985 | GTGACTAGAAAATCTGAACTAGG | 1674 |
| hs132693727 | AGAGAATAAAAGGCCCAGAATGG | 1675 |
| hs132692670 | ACAGTGCCTAAAGTCGAAAAGGG | 1676 |
| hs132691827 | AATGCGAAGCCACTACCCATGGG | 1677 |
| hs132692099 | TCACCAGGGCTGAGAATAGGAGG | 1678 |
| hs132691581 | TTACATTTCTAAATAAATGTGGG | 1679 |
| hs132690220 | ATGAAATACTTTAACACCCAGGG | 1680 |
| hs132687334 | ATATACCGCCTATAGTTGATGGG | 1681 |
| hs132686616 | AGATAGCTAGGCTAATTCCAAGG | 1682 |
| hs132693695 | CATTAGCTGCTTTCTAGCTGAGG | 1683 |
| hs132693946 | CAACACATACAATAAATGTAGGG | 1684 |
| hs132690416 | TCAAACTTTATTGCTCCAGTAGG | 1685 |
| hs132689250 | ATTAGTTCCTTTACTCAACAAGG | 1686 |
| hs132691880 | ATATAACACAGAAAGTAAAAGGG | 1687 |
| hs132688724 | GTGAGTAACTAGAAATGCATGGG | 1688 |
| hs132683830 | TTCACTGTATCTATGCAGAAAGG | 1689 |
| hs132693221 | AATTAAACTCCAATATATTGAGG | 1690 |
| hs132694124 | CATAATCACTGAGCTTCTCAGGG | 1691 |
| hs132688226 | AGATGAATGTGATTTAAATGGGG | 1692 |
| hs132684845 | GTTACATTTTCTATGACTAGAGG | 1693 |
| hs132687305 | AGAATGAAAATCTATCTGGTTGG | 1694 |
| hs132688820 | GGCTTAATAGAAGATCAGTTGGG | 1695 |
| hs132688892 | GATTACACCTTGTACTGGGATGG | 1696 |
| hs132692529 | ATTGTGTTCAAAATTTACACTGG | 1697 |
| hs132691942 | CCAACCAGCAAAATAACCCTAGG | 1698 |
| hs132690731 | TTTATAGTAGGCAGTGCATACGG | 1699 |
| hs132684046 | GAACAGGCGGGTCCCATGGGTGG | 1700 |
| hs132690925 | ATCGACTCTTGGAATGGCAGCGG | 1701 |
| hs132693170 | TGGTTCCAGTGAGATACAGCAGG | 1702 |
| hs132684424 | GGAAGAAGATCTTTGCATGCAGG | 1703 |
| hs132688386 | TACTGGAGAACCATGCAGTAGGG | 1704 |
| hs132688948 | GCCTTGTAGTTATCCCACATGGG | 1705 |
| hs132691092 | ATATGTGCTCAAGTGAGTACAGG | 1706 |
| hs132693315 | TTTGATGGAAGTATGAGTAAGGG | 1707 |
| hs132690547 | ACAATAACTGGAAAAGTGAAAGG | 1708 |
| hs132687368 | GTGTTTTAAGAAGATATATGTGG | 1709 |
| hs132693505 | TATAATTGAGAATTAGTGCAGGG | 1710 |
| hs132686420 | GAAATTGCTAATACAATGGACGG | 1711 |
| hs132691911 | CAAGGATAGGACTTTATCCATGG | 1712 |
| hs132690305 | GGGTATAAAGTTTCCTAAGAGGG | 1713 |
| hs132691477 | TTATGAGTCAGTTTGAAATGAGG | 1714 |
| hs132692081 | TGAAAAAAATAAGGACCAGAAGG | 1715 |
| hs132687322 | TGAGAAAAGCTTAAAGCTAACGG | 1716 |
| hs132689449 | GAGGGCAAAAGAACTGTAGACGG | 1717 |
| hs132686813 | GCTTTTGATGTATTCTAATGGGG | 1718 |
| hs132686208 | ATATGAGGAAATAGATCACCAGG | 1719 |
| hs132686176 | ACATAACAGACTCCTTTCACAGG | 1720 |
| hs132691821 | ACAGACTATTTTCCCCCCATGGG | 1721 |
| hs132685258 | CCAGGCAAAGAAAGAAGAGATGG | 1722 |
| hs132684195 | TTAAGACTCATTCAGGACTCAGG | 1723 |
| hs132692332 | TTTTCCAAACGTTTATAACAAGG | 1724 |
| hs132688051 | GTAGAGCTGTGTGAATCCATGGG | 1725 |
| hs132693465 | GTAAACATCATCAAGGCAGATGG | 1726 |
| hs132693381 | GTAGTTAAGGTACTAAAGTAGGG | 1727 |
| hs132689229 | GCAGGAAGTTGGGAGGCTGGTGG | 1728 |
| hs132690231 | GAGTTACTCTCCCATTCGAAGGG | 1729 |
| hs132689790 | AAAGGAATCCCCACAAATTGGGG | 1730 |
| hs132688695 | AAAAATCATATACATAGAAGTGG | 1731 |
| hs132685425 | TCTATTCATTCAGGCTAAGGGGG | 1732 |
| hs132689839 | ACAAGCGCTAGAAGTTATGCTGG | 1733 |
| hs132688606 | ATGATCTCAGAGTACTACATTGG | 1734 |
| hs132683405 | TACTGGTAGCAGAAAGAATGAGG | 1735 |
| hs132691685 | TCACCGTGATTACTAATGGATGG | 1736 |
| hs132685725 | TTTTAAACGTCCTTTTGTAGAGG | 1737 |
| hs132692972 | AAGGCCTAGTGAGGAAAGATGGG | 1738 |
| hs132693749 | ACTGGTTGACATCATTACGTTGG | 1739 |
| hs132686039 | GTACACGTTGTCTTTATGAAAGG | 1740 |
| hs132686655 | CATCTGATGCCTTAGCAAAGAGG | 1741 |
| hs132690733 | GCACGAATGTCAGTGTCGTATGG | 1742 |
| hs132688704 | TGCATTTTATTAAATTAGAGTGG | 1743 |
| hs132689814 | ACAATAAGTAAGCTTGTGAAGGG | 1744 |
| hs132688812 | TGGGGTACGATACAGTGTAAAGG | 1745 |
| hs132691955 | CTCCTTCGTTATGAATCTGGAGG | 1746 |
| hs132690243 | ATTATTTTACCAAGTTTGGAGGG | 1747 |
| hs132687748 | AAGTTGAAATACGTTCACTAAGG | 1748 |
| hs132694115 | GTATTTCGTAAGAGGATGCTGGG | 1749 |
| hs132686875 | CACACGTTTTTAATTTAATGCGG | 1750 |
| hs132692850 | ACCAGAAAAGAGTTAAAGCATGG | 1751 |
| hs132688325 | TGGAGATGAAGCCCTACACTAGG | 1752 |
| hs132686983 | GACGACACAGTTATTTCTAGAGG | 1753 |
| hs132689340 | GGAGAGCCTACATGTAGCCTAGG | 1754 |
| hs132686214 | AATCACATTTGATGTTGTAAGGG | 1755 |
| hs132688308 | TAATTACCTTCCCCATCCAAAGG | 1756 |
| hs132693917 | TTATCCCTAAGACCTATGTATGG | 1757 |
| hs132686682 | CACTTAAGATGTTAGAGGGAGGG | 1758 |
| hs132688864 | GCATCTTCTGTGACTATGCAGGG | 1759 |
| hs132688292 | TGATAAAAATTATTGAAAAGGGG | 1760 |
| hs132693251 | TGTTCCTTAGTATTGAGGGAAGG | 1761 |
| hs132689505 | CCATACCTAACCTCCATTGGCGG | 1762 |
| hs132687143 | TGTGTGGGTTTTTATGCCTGTGG | 1763 |
| hs132690301 | CTGACAACACAGAACGAACCAGG | 1764 |
| hs132684191 | TGTGTGTTTCAGAGTTGGGATGG | 1765 |
| hs132683322 | ATACGTGCATGCTTTAAGGAAGG | 1766 |
| hs132692553 | GGCTGACTGGACCAAGATTGAGG | 1767 |
| hs132689721 | TATTATAAAAGCAGGTCAGAGGG | 1768 |
| hs132686789 | TCCTACAGACAATTTTGCCAAGG | 1769 |
| hs132693736 | TATATTTGAGGAAATAATGAGGG | 1770 |
| hs132687745 | GGCTGACACAATCATAAGCATGG | 1771 |
| hs132691863 | TTTCATCTAGACTGAACTCATGG | 1772 |
| hs132685279 | CCTAGTAGATTGTAAGGCCAAGG | 1773 |
| hs132693050 | AGTATTTTGCATGAAGCCAAAGG | 1774 |
| hs132688723 | TGTGAGTAACTAGAAATGCATGG | 1775 |
| hs132683614 | GTTAGATACAATGCAGGCCGGGG | 1776 |
| hs132689367 | ATTAGCAGTAGATGTATCTAGGG | 1777 |
| hs132689910 | CTAGTGTATGAGATTAGATGAGG | 1778 |
| hs132690724 | CTTTTCTTTTAATATACCCAAGG | 1779 |
| hs132688653 | ATATTAAAGATTGAAGTCAATGG | 1780 |
| hs132686654 | ATGCCTTAGCAAAGAGGAGTAGG | 1781 |
| hs132685688 | GTATGTGCATTAGAGAGCTATGG | 1782 |
| hs132691273 | TCCTTTAAGTAAGACAGCCAGGG | 1783 |
| hs132692376 | GCTAGAGAAGGTCAGAAGAAGGG | 1784 |
| hs132684153 | ATGAAGCCTTCCAATTTACCTGG | 1785 |
| hs132693301 | GCATAAAATCTACCAGTAGGTGG | 1786 |
| hs132683541 | AAGATCTAGGTCGAATGTGAGGG | 1787 |
| hs132693766 | GATATAACCACAATCAGAAGTGG | 1788 |
| hs132691030 | GGAAACAACTTGAAAGAGGAAGG | 1789 |
| hs132691167 | AATGGAAGAATTTATCTGGTAGG | 1790 |
| hs132685095 | TTACTTCGTAGAATGGTGGTTGG | 1791 |
| hs132685727 | TACTTCATTTTTCTCCCGAGAGG | 1792 |
| hs132690613 | CATCGTTATGTGAATGCCATGGG | 1793 |
| hs132693623 | TATTACAATGTAATTAGCCATGG | 1794 |
| hs132694129 | TTTCTTTTTCCTGATTCCAAGGG | 1795 |
| hs132693966 | TCTCTTTTTAATTTCCTAGGAGG | 1796 |
| hs132692042 | CTATAATTTAATAAATCCAAGGG | 1797 |
| hs132690238 | AGGGAGCTTGAAATTTTGCAAGG | 1798 |
| hs132694029 | TGAATGGGTCAGCAGCCAAAGGG | 1799 |
| hs132684259 | AGATTTAGATTAACTGGGGTAGG | 1800 |
| hs132686112 | TGAATACCAAGAGGATGGAAAGG | 1801 |
| hs132684258 | ATCTAAATCTGCAAAACGAAAGG | 1802 |
| hs132693238 | GAAAACACTCAATTGGGGAGAGG | 1803 |
| hs132694371 | AAGCAAATGGAGCATGAGCATGG | 1804 |
| hs132685002 | AATTTGCCCTTATGAAAGGAAGG | 1805 |
| hs132684586 | GATTTATAAAAGGCAAACATGGG | 1806 |
| hs132693544 | ATTAAGCACTATGTCTGCATAGG | 1807 |
| hs132691182 | TTAGTTTAAAACAATACTGAAGG | 1808 |
| hs132686749 | ATTAAAAAGAACTTTCCCACAGG | 1809 |
| hs132686817 | TAGTTTCAGTTTTCAAACTGTGG | 1810 |
| hs132692431 | CTCTCTCATGGACAGTCAGAGGG | 1811 |
| hs132688678 | AGAGCTTCTTATTGAGAAAGGGG | 1812 |
| hs132693248 | TATGCTCACCCTTTACAGAAAGG | 1813 |
| hs132683352 | AGTATTTCCTTTGTTGACAAGGG | 1814 |
| hs132692968 | CTCCGTGCAGATTCTAAGGAAGG | 1815 |
| hs132686306 | GAAACCAGCAGGGACCTGAATGG | 1816 |
| hs132688491 | GCTTTCTGAACTGATTGGAAAGG | 1817 |
| hs132691348 | AGTATCCCTTGATACCTGAATGG | 1818 |
| hs132684271 | GGATGGGAAAACAATCAGAATGG | 1819 |
| hs132688461 | ATGAAATGTTTCTCAGCTAAGGG | 1820 |
| hs132693648 | GATGTTGGAGCAATAGCCACAGG | 1821 |
| hs132689987 | GGGATAATCACTTTCACTAACGG | 1822 |
| hs132689461 | ACAGACTCTTAAGCAGCAGTGGG | 1823 |
| hs132688212 | ATATCTGAGCAACAGATGCTAGG | 1824 |
| hs132686494 | TATCTCAAGAGCAAACACTTAGG | 1825 |
| hs132689067 | TTGCATCAGTTTCTAAACGAGGG | 1826 |
| hs132692721 | TAGTTTATATTACTTGAGGGTGG | 1827 |
| hs132684513 | TATTCACTGCCAATAACTTGGGG | 1828 |
| hs132687996 | GATGAAAAACAACTGCAGAAAGG | 1829 |
| hs132686542 | CAAAAGTTCATAGAAAAAAGAGG | 1830 |
| hs132693431 | CAACCCACTTGCATAGTGTAGGG | 1831 |
| hs132691500 | TCTAAGTGACAAAATTCTGATGG | 1832 |
| hs132683944 | TTGTCTTCTATGGCAAACCATGG | 1833 |
| hs132689175 | GATAGATTTACAGAAAGAGAAGG | 1834 |
| hs132691481 | AAGTATAGTTTCTCAATAGGAGG | 1835 |
| hs132686500 | CATATTCATTATGAATGCTGAGG | 1836 |
| hs132688784 | ATATTGAGATACTTGCCATAAGG | 1837 |
| hs132688137 | TGACAGCAGTCAGTTCATTGAGG | 1838 |
| hs132686755 | TTGAAGAGATAAAAACAAGCGGG | 1839 |
| hs132694067 | TGCTGTCAATGTACACCTGAAGG | 1840 |
| hs132686867 | GAGAGAGAAGACTTGCAAAAGGG | 1841 |
| hs132693542 | TTAACTAACAGACTAATGGAAGG | 1842 |
| hs132686849 | AGCATAATTTAATAAATAGACGG | 1843 |
| hs132693109 | TGGGTAATAGGAATATGGGATGG | 1844 |
| hs132689415 | AGTGGGGCAAAAAATGAGGTAGG | 1845 |
| hs132688584 | GTATGGTACTGGGATTGTAGTGG | 1846 |
| hs132692148 | TTTATAACCCTGATATTCCAAGG | 1847 |
| hs132693077 | ACAGTTCCTAAGGCCTTACCTGG | 1848 |
| hs132690279 | TTTTGATTGGATTCAGAGAGAGG | 1849 |
| hs132694220 | CTACTCCACTCGCATCATCCAGG | 1850 |
| hs132683941 | TTCATATTTCAATATCCCCATGG | 1851 |
| hs132687312 | GGAAGAACTTGAGCCAACTTGGG | 1852 |
| hs132684323 | TTGATATGCTAAATAAAAGGGGG | 1853 |
| hs132684400 | ACATGTGTCGGTGCTTGAGAAGG | 1854 |
| hs132684102 | CAGAGATCCTACAAGAATCCCGG | 1855 |
| hs132689837 | CTAGAAGTTATGCTGGTCCACGG | 1856 |
| hs132684200 | CATTCGTGTGTGCTGTGTTGTGG | 1857 |
| hs132690643 | AGTTAGTGCACAAGAGGCGTTGG | 1858 |
| hs132686831 | TCGCAGAGAATAAGAATCAAAGG | 1859 |
| hs132691347 | ATGTTCCATTCAGGTATCAAGGG | 1860 |
| hs132688670 | TGGGGAAAAAACAGACCAGATGG | 1861 |
| hs132689205 | TTAGTTGACAACACTGCTGAAGG | 1862 |
| hs132686016 | GCTTAGCATAACCATAACCTAGG | 1863 |
| hs132693033 | AGATAGGAAAAGGTTAGTTGAGG | 1864 |
| hs132683968 | GTGAGATGTCTACCAATGCCGGG | 1865 |
| hs132693392 | GGCCACCTGCTCTTATGCGTAGG | 1866 |
| hs132692792 | AGAAAGAAAATATACAAAGGAGG | 1867 |
| hs132691756 | CAGATGATCCTACAGTTATGAGG | 1868 |
| hs132683804 | ATATTACTCTTCAGCCACCTAGG | 1869 |
| hs132685699 | ATATCTAAATGTGAAGTTGGCGG | 1870 |
| hs132691464 | GAGAGGATCCAATGCCACATTGG | 1871 |
| hs132691081 | AAGCACTATGGTGTGCCACTTGG | 1872 |
| hs132691848 | GAATCTAGGCAGCTATTCCAGGG | 1873 |
| hs132693483 | AGGAAAGGGTAGTTTTCAAGAGG | 1874 |
| hs132686377 | TGACATCAAGGAATATTAAGTGG | 1875 |
| hs132684429 | CTTGACCTAGAATCAGAAGTTGG | 1876 |
| hs132689063 | GTTATCTAAAATAATCAGCATGG | 1877 |
| hs132693797 | GCCAGCACACAGGTGCCTTGAGG | 1878 |
| hs132694326 | TCATAATTCATATATACAGCAGG | 1879 |
| hs132688378 | GCTCCCCCCACCCTACTGCATGG | 1880 |
| hs132687314 | TCTGTTTGATGAAGGAGGCTGGG | 1881 |
| hs132683940 | TGCATCTAACATAATAAAGAGGG | 1882 |
| hs132693305 | CCAATGAGTGACCCACCTACTGG | 1883 |
| hs132691670 | ATGATGCTAAAAAAAATTGGAGG | 1884 |
| hs132687976 | AAAAACTGAGCATTATGCAAGGG | 1885 |
| hs132689595 | TTCTAAAAGCAGGTGTAAGAGGG | 1886 |
| hs132689592 | TATCCCAGATAAGAGCCTTAGGG | 1887 |
| hs132694192 | TGATCAAATATGTTCTAGAAGGG | 1888 |
| hs132690972 | ATTCCTACAGAACTCTCTGATGG | 1889 |
| hs132685750 | TATATATACGTGGCTTATGAGGG | 1890 |
| hs132687173 | ACATTTTCGTTGGCAGTGAAGGG | 1891 |
| hs132690300 | TCGTTCTGTGTTGTCAGACAGGG | 1892 |
| hs132693889 | TCTGGATTTAAATTTCTAAGTGG | 1893 |
| hs132685264 | ATTTTCTTAGAATATGGCTAAGG | 1894 |
| hs132688326 | AGTGCTATCATCCTAGTGTAGGG | 1895 |
| hs132687120 | GAATGGTAAGTTTGTCTGCAGGG | 1896 |
| hs132692226 | CTCAGGGTAATGCTTAGAGGTGG | 1897 |
| hs132688691 | TCTTTTTTTCACCTACTCGTAGG | 1898 |
| hs132690087 | AAAATAACTAGGAAGCAAAAGGG | 1899 |
| hs132684797 | TAATGCCCATGTGAGAAAAGAGG | 1900 |
| hs132688025 | AATTGATAGCAAGATTTCAAGGG | 1901 |
| hs132691480 | TATAGTTTCTCAATAGGAGGTGG | 1902 |
| hs132686379 | ATATTAAGTGGCACATTGAAGGG | 1903 |
| hs132690573 | TATATTACTTTGGAAGTGCAGGG | 1904 |
| hs132690096 | GAAAAATCACAAAATCAGAATGG | 1905 |
| hs132688501 | TGGCAGGATACAGGAATACCAGG | 1906 |
| hs132684250 | ATTAGGCTCAACTTTTCAGTCGG | 1907 |
| hs132692130 | CTAGTTGAGGACGTGTGCAACGG | 1908 |
| hs132685543 | TATTGTAGCTCAAATGTTGGAGG | 1909 |
| hs132690526 | ATAAACCCTTGTTTAGGCCAAGG | 1910 |
| hs132690715 | ATAAATACACATTTATTCCACGG | 1911 |
| hs132690177 | CTACGCAAAGTCACCTTCAGAGG | 1912 |
| hs132685780 | GCATATGAGTTTGTGAGCGAAGG | 1913 |
| hs132685926 | TGATATCCAAAAATGAAGACAGG | 1914 |
| hs132686091 | CTCTTCCAGCAGCTTCCTAGTGG | 1915 |
| hs132686188 | ATTTAGCTCTGATAATTACAAGG | 1916 |
| hs132690224 | ATGTGCCTTCTTAAACCAGATGG | 1917 |
| hs132693838 | CTATTTCACACCGTAAAAGTCGG | 1918 |
| hs132691038 | AGTGTAGTCATCTTTGTGGTAGG | 1919 |
| hs132683761 | TAATAGATGTGAGTGTAGGTTGG | 1920 |
| hs132684800 | TGAGTTAGAAGGTAGAGGAGTGG | 1921 |
| hs132693640 | GAATTAAGCGTTAACAAAGAAGG | 1922 |
| hs132690246 | AGTTAAAATGGCAACACCATGGG | 1923 |
| hs132694108 | ATACTTTGAATCTAAGGGAAAGG | 1924 |
| hs132685060 | ATATGTTCTGTACATCAGCCGGG | 1925 |
| hs132684207 | CACTGTACATTGACTTCCCAGGG | 1926 |
| hs132688385 | TGGAGAACCATGCAGTAGGGTGG | 1927 |
| hs132689769 | CTAAGTCCAGTGGGTGTCTGAGG | 1928 |
| hs132688481 | TTAAAACAAGAAAGCTCTAGTGG | 1929 |
| hs132688766 | ATAAGTATGTTTGGCAGTGGTGG | 1930 |
| hs132691662 | TTTATGTTTAGAATATAGAAGGG | 1931 |
| hs132687456 | AGTGCTTTAGGCTATTTCCCAGG | 1932 |
| hs132687161 | AATCCTCAACTCCTCTTCAAGGG | 1933 |
| hs132683324 | ACGTGCATGCTTTAAGGAAGGGG | 1934 |
| hs132684894 | AAAGGGAAAATAATAAGCTAGGG | 1935 |
| hs132694089 | TTACTAATATCTATATAGAGTGG | 1936 |
| hs132691140 | GCCATACTTCTGTCAACCACTGG | 1937 |
| hs132690614 | ACATCGTTATGTGAATGCCATGG | 1938 |
| hs132683760 | CATTTAATAGATGTGAGTGTAGG | 1939 |
| hs132683482 | CACGTAGTGAAGAAATGCAATGG | 1940 |
| hs132688949 | GGCCTTGTAGTTATCCCACATGG | 1941 |
| hs132690278 | TTGGATTCAGAGAGAGGCAATGG | 1942 |
| hs132684918 | GAGTTGTGACTCGCTAAAGAAGG | 1943 |
| hs132687061 | AAGCTTCTATCTGATTGAAAGGG | 1944 |
| hs132691588 | TCATCCGTATTTTATAGGAAAGG | 1945 |
| hs132685958 | TATCACCTCAGAGATATGCTAGG | 1946 |
| hs132689740 | AATTTGGGCATACTTGTATGGGG | 1947 |
| hs132688252 | AACGCGTTTAGGAAAAATAGAGG | 1948 |
| hs132693806 | ATTTTCTGATGAAAATTCAGTGG | 1949 |
| hs132684875 | ATAATCTTTTGCTAGGGCTGAGG | 1950 |
| hs132685462 | TTTCAGTGAGGTAACCAGCCAGG | 1951 |
| hs132691917 | CATGTACCTTTCAAGGGAGTAGG | 1952 |
| hs132684667 | AGATTTCTAAATGGCTACACAGG | 1953 |
| hs132688735 | TTAAAGCCTAGAGCATAGACAGG | 1954 |
| hs132692612 | ACCCAGGTAGTATCGCTGACAGG | 1955 |
| hs132693989 | AATCCTCCTGAAAGTTTGCATGG | 1956 |
| hs132688976 | TCCTCAGATGTCTATGCGAAAGG | 1957 |
| hs132689337 | CAGTAGCTCAGAATGAGATAGGG | 1958 |
| hs132690115 | CCAAAAGCAGAGTGGAAGAAGGG | 1959 |
| hs132683312 | ATCATTTCTCCATGGTTGGGTGG | 1960 |
| hs132692486 | TTTAACATAAAAAGTAGAAGAGG | 1961 |
| hs132692730 | CTTTTTTAAGGATGAAGGAGGGG | 1962 |
| hs132690318 | CTTTTATTAAACTACACAAGTGG | 1963 |
| hs132687299 | CAAACTTGCTGTAACCCTATGGG | 1964 |
| hs132688348 | AAAATTCTCTAATAAACTGGAGG | 1965 |
| hs132690820 | ATTTCCCCGTTTTCATACTGAGG | 1966 |
| hs132689735 | TATTGCATGACTCAAATACATGG | 1967 |
| hs132685261 | TCCAATTACAATAATCAAAGAGG | 1968 |
| hs132684087 | TCGAGCCCCGCGAGAAGGAGGGG | 1969 |
| hs132683606 | GTATATGAAAAGGTGTTAAGTGG | 1970 |
| hs132690632 | CATATGCCTCACTAAGGTCCTGG | 1971 |
| hs132693879 | GAGAACTGTTTGTATGGCTAGGG | 1972 |
| hs132685605 | TCAGACAGACTATCATTCAAAGG | 1973 |
| hs132689572 | ACTCTCCTGAAGCATAAACTTGG | 1974 |
| hs132688047 | ATAATCTTACATTCTCCCCATGG | 1975 |
| hs132685527 | ATATTATAAATTAGGCCATAGGG | 1976 |
| hs132690803 | ATGTACCTCATTTGCTAACGTGG | 1977 |
| hs132683538 | TAGTGAGTGTCCTCATTCTAGGG | 1978 |
| hs132692929 | TCTGTGTTTCTGGATGAAATGGG | 1979 |
| hs132693984 | AGACGTACATAAACTACCAATGG | 1980 |
| hs132690822 | ACAATTGGCTCCTAGAAGGTTGG | 1981 |
| hs132684076 | TTCCGCCCCTCCTTCTCGCGGGG | 1982 |
| hs132691489 | TATGGACCAAGAATAATGAATGG | 1983 |
| hs132693792 | GCTATGCATTAGAAGGAAGTAGG | 1984 |
| hs132686375 | ATTTCAGCTGCTCAAATGGAAGG | 1985 |
| hs132685411 | TCTTATGTAAAGAACACAAAAGG | 1986 |
| hs132693052 | GGCTTCATGCAAAATACTGAAGG | 1987 |
| hs132685356 | CTCATAGGCAATGTATTCCAAGG | 1988 |
| hs132694170 | GAAATTCCTGTAAAACCCATAGG | 1989 |
| hs132693899 | AGTTGTTTCTCAGGCATCTGTGG | 1990 |
| hs132691102 | CCATCAACCCAGTATTATGTAGG | 1991 |
| hs132692776 | ATTTGTAATACAAATTACGATGG | 1992 |
| hs132689609 | CTCTGAGCAACATATTACAATGG | 1993 |
| hs132684949 | CAACACCCAGATTAAGGCATCGG | 1994 |
| hs132692759 | CAAAACCCCAAAGATTGTTACGG | 1995 |
| hs132692396 | ACATGTCATATGCTTTCCCATGG | 1996 |
| hs132689919 | ATACTAAACAATTGATACCATGG | 1997 |
| hs132689238 | TGTGGTCACCAAGTCACCTGTGG | 1998 |
| hs132683885 | TGAGTATTAATTAGGACACTTGG | 1999 |
| hs132685899 | CAAATCAAGCAACACTCACACGG | 2000 |
| hs132692472 | ACTCATCTGTAATTTCAAGTTGG | 2001 |
| hs132686505 | AACTCTATAGTGATAACAGCTGG | 2002 |
| hs132685864 | GTAACATGTTTTGATTGAAACGG | 2003 |
| hs132692735 | AAGTCATGTTTTTCAAACAACGG | 2004 |
| hs132688778 | CCTGCATTTAACGCATTAGGAGG | 2005 |
| hs132689199 | ATATGTATGTATATATTCATGGG | 2006 |
| hs132684069 | AGGCGGTAGCTATTTAGGCTTGG | 2007 |
| hs132692270 | CAGCATATGCTAATTGCGTATGG | 2008 |
| hs132689706 | TATATTATATAAGGCCTGGATGG | 2009 |
| hs132688964 | AGAAAATTAGTTCTTGCCTAGGG | 2010 |
| hs132691365 | TCTGGCTGACTAATTAGCAATGG | 2011 |
| hs132693653 | ACAGAAGTAAGCGGGTTAGAGGG | 2012 |
| hs132684331 | GGAAAGTCCTTTTTTTACAAGGG | 2013 |
| hs132691920 | GCTAGAATGACTCTCAGCCTAGG | 2014 |
| hs132686973 | AAGAAACCATTGCTGTGAGAGGG | 2015 |
| hs132685181 | GGAAGGGTGGAATAATGTCTAGG | 2016 |
| hs132684964 | CTAACCATTATAGAATTCCTGGG | 2017 |
| hs132693793 | CTACGCTCTTTGCAGCCTCAAGG | 2018 |
| hs132693442 | TCTGAGCAGAGATCAACTGCTGG | 2019 |
| hs132685167 | GCAATGCTATATAGATGAGCAGG | 2020 |
| hs132686564 | AGTCAATCAGCTGAAAGCCTTGG | 2021 |
| hs132689644 | ACCTGTATATGTAATTTCCAAGG | 2022 |
| hs132684686 | TACCTGTGGTCTAAAAAAGTCGG | 2023 |
| hs132687126 | TGCATATCCTCAGGGTTCATCGG | 2024 |
| hs132683740 | TCCTGGGAGCTAATCAAAAGAGG | 2025 |
| hs132692247 | GTAAATCCTCTCATTAAGATGGG | 2026 |
| hs132683998 | AGAAGTCAGTTCGAACTCCCTGG | 2027 |
| hs132688033 | GAAAGGATAATATAATGAGTTGG | 2028 |
| hs132689298 | AATATGGCAGATAAATTGCAAGG | 2029 |
| hs132686742 | ACTCTTTAACCAAAAGGCTGTGG | 2030 |
| hs132690235 | ATTCTGATAACCCCTTCGAATGG | 2031 |
| hs132684357 | GTGCCTACCAAGAGAAGAAGAGG | 2032 |
| hs132688499 | TGTGGGAAATCGGAGATGGCAGG | 2033 |
| hs132691122 | TGCTATCTAGGTTTAAGTGAGGG | 2034 |
| hs132692208 | ATTTTGATGTCATTACCATAGGG | 2035 |
| hs132693988 | TGAAAACAGTTACCTCCCATTGG | 2036 |
| hs132690075 | CTGATTTAGTAGACGCTGAAGGG | 2037 |
| hs132688823 | ACTTGGCAATCCAAGCAAGATGG | 2038 |
| hs132685997 | AAAGATTCATCCCAGTTTAGCGG | 2039 |
| hs132694348 | TATATGATAGTCTATTAACTTGG | 2040 |
| hs132688179 | TCCAGCTAGGACAGGCCTGAGGG | 2041 |
| hs132688585 | TATGGTACTGGGATTGTAGTGGG | 2042 |
| hs132691249 | ATTAGAAACACAACACAGCCAGG | 2043 |
| hs132691568 | ATAATGCACAAATATAAAGAAGG | 2044 |
| hs132687491 | GGTAAACGTGGCAGAAAGCAGGG | 2045 |
| hs132685835 | TATGCCTTAATTTCAGCCTGTGG | 2046 |
| hs132691853 | GCTATTCCAGGGGCCAGATGGGG | 2047 |
| hs132691260 | AACAGAATTCACTATCTCTAGGG | 2048 |
| hs132687383 | ATATTTACTGAACATTACATTGG | 2049 |
| hs132693696 | CTTTCTAGCTGAGGATGAGTAGG | 2050 |
| hs132694133 | AACAAGAACTAAATTTGCCAGGG | 2051 |
| hs132687517 | GGTTCTGTTTGACTTTTGAAAGG | 2052 |
| hs132693918 | ATGTATGGCAGAAGAACTAAAGG | 2053 |
| hs132687316 | TGAGCTCTGTTTGATGAAGGAGG | 2054 |
| hs132692288 | AATACAAAACAAACACAAGTAGG | 2055 |
| hs132687432 | GCTTCTAGTTTCACTAGGAACGG | 2056 |
| hs132685218 | CATAACTCTGACATAATCGTTGG | 2057 |
| hs132685990 | ACTTACCTAGTTATTTACTCTGG | 2058 |
| hs132684559 | AGTCCTTTCTACAGTTCCCAAGG | 2059 |
| hs132691031 | CCCAGGAAACAACTTGAAAGAGG | 2060 |
| hs132688626 | CTATCTTCTAGAGAGTTGACAGG | 2061 |
| hs132693149 | TCTCAATTAGTACAAAGCCATGG | 2062 |
| hs132685010 | ACATATTCAAAAATAGAGGTTGG | 2063 |
| hs132688965 | AATTAGTTCTTGCCTAGGGAAGG | 2064 |
| hs132684952 | CAGTGGTTAGGAGGAAGGAGAGG | 2065 |
| hs132685071 | TTTTCTAAGTGGACTTAGGAAGG | 2066 |
| hs132692188 | TGTGACTGATATGAATTCAAGGG | 2067 |
| hs132692622 | GCTTGATAGTATTTCACCACAGG | 2068 |
| hs132686570 | TTCAGGTTCTCGATGATGCAAGG | 2069 |
| hs132690939 | TCGCTAAGCTTGTCACCACATGG | 2070 |
| hs132691328 | GGAAAATTGCAGAATGCAGAGGG | 2071 |
| hs132683393 | TCATCCAGCACCATTAAAGAAGG | 2072 |
| hs132684347 | CTAACTTACCTTACTTGCAAAGG | 2073 |
| hs132686623 | ATAAATGGAGTAAAAGTTGAGGG | 2074 |
| hs132692501 | AACGTTATAGGCCCATAAAAGGG | 2075 |
| hs132691356 | TATCAAATTTGTTAAACAGGTGG | 2076 |
| hs132690831 | AAGATTGCGAACATAGCAAAAGG | 2077 |
| hs132689646 | GTTTTCAAATTTAAGCCAGAGGG | 2078 |
| hs132685202 | AGTGTGCTTCTTATGTCCTGAGG | 2079 |
| hs132693276 | AATCCAAACAGTGTTCATATGGG | 2080 |
| hs132686024 | GTGCCGTGCTACTTAAGAGAAGG | 2081 |
| hs132690720 | GTATAATCTATTTGAGGGCAGGG | 2082 |
| hs132691916 | AAACTTCATGTACCTTTCAAGGG | 2083 |
| hs132686802 | TTATTGCTGAAGCATGTGATAGG | 2084 |
| hs132688588 | CTACAATCCCAGTACCATACAGG | 2085 |
| hs132693975 | ACCTCAGAGGTTACAAAGGAGGG | 2086 |
| hs132687014 | ATATAAACTAAATTTTTCCAAGG | 2087 |
| hs132689086 | GAATCATTATTATCAACAGAAGG | 2088 |
| hs132688713 | GATCACAAAATATCTCTCAAAGG | 2089 |
| hs132684754 | TTCATGGTCCTCGATGCTGAGGG | 2090 |
| hs132689459 | TTTTTTCCCCTGAGTTACTGAGG | 2091 |
| hs132689411 | TGCAATGTGTGGTATATGAGTGG | 2092 |
| hs132689239 | CAGAAATGAGAACACAGGGTTGG | 2093 |
| hs132687881 | TTCTAATATCCCTCTCCCAAAGG | 2094 |
| hs132692393 | TGGCATAATCATTTGCCCATGGG | 2095 |
| hs132688943 | CCCCATGTGGGATAACTACAAGG | 2096 |
| hs132691754 | GTAGGATCATCTGCCGCTGATGG | 2097 |
| hs132689162 | AGTGGCTTAGCTGTAAATAGAGG | 2098 |
| hs132688286 | GTAGACATAGAGCTCAGAATAGG | 2099 |
| hs132693904 | CTTTTTAGCAACCTATTCCAAGG | 2100 |
| hs132684664 | AGACACAGCTATAAGGAAAGAGG | 2101 |
| hs132688331 | TTAATGGGAATTGACAAAAAGGG | 2102 |
| hs132684785 | TTCTATTTTCAGGAACCTAAGGG | 2103 |
| hs132687277 | TTACTCTTATTGAGAAAGCTCGG | 2104 |
| hs132688951 | ATTTGTTACAAAAATCAAGATGG | 2105 |
| hs132692152 | AAATACACCTTGGAATATCAGGG | 2106 |
| hs132689050 | GTCACATGATGCAGGCAGCTGGG | 2107 |
| hs132689545 | GATGAGGAGAAGGGTAGGAGAGG | 2108 |
| hs132688058 | CATTTTTCAGAGAAGAAGAGAGG | 2109 |
| hs132687397 | TTATTGGAATTTGTTATGGAGGG | 2110 |
| hs132692166 | CATTTGCTTTGCCACTCACATGG | 2111 |
| hs132694172 | CTTTCCCTAGAAAAAAAATGTGG | 2112 |
| hs132686382 | GAAAACAATTTCTCAATCCACGG | 2113 |
| hs132689224 | GCTATTTTTAGGTTTGGGGTAGG | 2114 |
| hs132689065 | CATCTGATTTCAAATCTGCATGG | 2115 |
| hs132693409 | ATAAGGAGATACAAAACAGATGG | 2116 |
| hs132683612 | GTGTTAGATACAATGCAGGCCGG | 2117 |
| hs132692604 | CCTCTTATAAAGACGAGAGCAGG | 2118 |
| hs132685490 | GCCAAATAGGGATACCTCAAAGG | 2119 |
| hs132689108 | TTATAGTTTTATCTGGCCTGGGG | 2120 |
| hs132691252 | GGGAGCAGAAGAATTAGAAATGG | 2121 |
| hs132691945 | AGGGACAAAATAAAGTCAGTTGG | 2122 |
| hs132687630 | TGTGAAACATACCAAAGGAAAGG | 2123 |
| hs132687863 | ATAATTATGCCATATTCAGATGG | 2124 |
| hs132693255 | TGAACCTTCCCTCAATACTAAGG | 2125 |
| hs132694387 | CAGCTGGGTCGACATCAACTTGG | 2126 |
| hs132688354 | GTATTAAGCGAAGCCATGGCAGG | 2127 |
| hs132683483 | ACGTAGTGAAGAAATGCAATGGG | 2128 |
| hs132687373 | GATGAAGTTTGGACAATGGATGG | 2129 |
| hs132689255 | AGCAGCTGCAGAGTGTTCTGAGG | 2130 |
| hs132694048 | ATGCTAACCTGAAATTGTATGGG | 2131 |
| hs132685871 | TTAAGGTGCGTATAAACTCATGG | 2132 |
| hs132688144 | AGCTAAAGAGTAAATCAGGCAGG | 2133 |
| hs132690679 | GGTGTTTCTTACCTGATGGAAGG | 2134 |
| hs132692992 | CATCAAGGTGAATGGGAAAGTGG | 2135 |
| hs132692871 | GTAATGCTTTCTCTTGTGAAAGG | 2136 |
| hs132684100 | GAAAAAATGAGAGCTGAAGATGG | 2137 |
| hs132687125 | TGTTTTCATGCATATCCTCAGGG | 2138 |
| hs132691574 | AAATCTAAGTGGAAGTCCAAGGG | 2139 |
| hs132684870 | CCAGGAAAAGGGGTTCAAGAAGG | 2140 |
| hs132688525 | CTACTTTTTCAGGTATTGTGGGG | 2141 |
| hs132685698 | TATGTGTCTACGTTGCTGGATGG | 2142 |
| hs132687431 | TTTCAGCTTCTAGTTTCACTAGG | 2143 |
| hs132688321 | GCAGTATAGGCTTTAAAGTAGGG | 2144 |
| hs132683590 | GTTGGACTCAGAAACCAGATTGG | 2145 |
| hs132684788 | TGGTCCTCATCAAAGTCCGCTGG | 2146 |
| hs132688522 | AAGTCACTGATATTTAATAGAGG | 2147 |
| hs132693860 | GTACATCACAGCAAAATAAGTGG | 2148 |
| hs132692413 | CATTTTGCTGAATTTAATTGGGG | 2149 |
| hs132691384 | AATACCAGATAAATGTAGCTCGG | 2150 |
| hs132693393 | GCCACCTGCTCTTATGCGTAGGG | 2151 |
| hs132683833 | TAACCAGTAACCGCTAAAAGAGG | 2152 |
| hs132686940 | TCAGAAGCAGGCTTCCCTAAAGG | 2153 |
| hs132683993 | TATCTCCAACAACGGAAAAGAGG | 2154 |
| hs132683864 | ATATAAATATAAGGGAATGTTGG | 2155 |
| hs132684088 | CTCGAGCCCCGCGAGAAGGAGGG | 2156 |
| hs132689015 | TCTTAAAGACAGTATACAAACGG | 2157 |
| hs132692658 | ATTTGAGGGGATGTCACAATGGG | 2158 |
| hs132687952 | GTTACTTAGTAATTCTCTGTAGG | 2159 |
| hs132693744 | TATCAGCAGATCCATCTGCTTGG | 2160 |
| hs132684493 | TTTATAGTCCATCATTTGCAGGG | 2161 |
| hs132685888 | TTTCATGTAGTTGGGATCAAGGG | 2162 |
| hs132691502 | GAATTTTGTCACTTAGAGAAGGG | 2163 |
| hs132688155 | ATTATTTGCTAGCCTCATGTAGG | 2164 |
| hs132693269 | CATTCATTTGGCCTTTGGAGAGG | 2165 |
| hs132690641 | CCTAAAAGTTAGTGCACAAGAGG | 2166 |
| hs132694284 | TTGCCTGCTCTTCAGGTGCGTGG | 2167 |
| hs132685285 | GAGAAAGAACACCTGTGCATTGG | 2168 |
| hs132684017 | TTATCTGTGAATCACCCAATGGG | 2169 |
| hs132685976 | CCTCCCTAATACCAGTGAAAGGG | 2170 |
| hs132692731 | TCTTTTTTAAGGATGAAGGAGGG | 2171 |
| hs132687790 | GAGTTATTTTAAATGTATAGGGG | 2172 |
| hs132693607 | GAGACAGAAATGAAAAATCAGGG | 2173 |
| hs132694139 | ATCTTTTCTTGAGTAGCGAAAGG | 2174 |
| hs132684607 | ACTTTGGTACTATTCCATAGTGG | 2175 |
| hs132690417 | AAGTTTGAAGAACTTTTACCAGG | 2176 |
| hs132688662 | AGTGTAAATAAACCAACTGATGG | 2177 |
| hs132689388 | AAACATTTCTTGCCATTCAAGGG | 2178 |
| hs132687980 | TATTTCAGAGAAAAAATATGTGG | 2179 |
| hs132690364 | AAGGCAGAAGTTTTGCCACTGGG | 2180 |
| hs132685207 | AGTTCTGCCAGGTTTATGTACGG | 2181 |
| hs132691660 | TTAATTAAAAGGAACGAAAGTGG | 2182 |
| hs132685788 | AGGGATACTTAACCAAAAGCTGG | 2183 |
| hs132687358 | ATATAGGAGACGTAATATATGGG | 2184 |
| hs132694353 | CTCAGGCTATGGAGGAGACTGGG | 2185 |
| hs132690712 | AAAACAATGGAACTGGGCCGTGG | 2186 |
| hs132683801 | CTAGGCCAGATAAGGAGCCCTGG | 2187 |
| hs132692283 | TCAATCTTAGCACCAGTGCCAGG | 2188 |
| hs132687750 | TATAGAATAGCTATATATTGAGG | 2189 |
| hs132684404 | GGAAGTTAGGAGGAGCAAGCTGG | 2190 |
| hs132692948 | CATCCCCTGCTTATTAGGATAGG | 2191 |
| hs132689955 | CCCATTCTCTAGACTTGCATAGG | 2192 |
| hs132693599 | ACACTCATCATGGGGGAGGAGGG | 2193 |
| hs132685208 | GTTCTGCCAGGTTTATGTACGGG | 2194 |
| hs132689659 | TATTACAATAATAAATTCAAGGG | 2195 |
| hs132687516 | CACTGTCCCTTAAAGCTGATCGG | 2196 |
| hs132689223 | CGAGCCTCATTCTTTTGTAGTGG | 2197 |
| hs132692753 | AACTTCCGTAACAATCTTTGGGG | 2198 |
| hs132684943 | TCTCCCCGATGCCTTAATCTGGG | 2199 |
| hs132690748 | TTAAAGAAAGAAATTAGGAAAGG | 2200 |
| hs132683564 | GGAAATGAATTGGTGACAGAAGG | 2201 |
| hs132687033 | ATTATAAGCATGGACCGTGCTGG | 2202 |
| hs132688297 | AACAACTTCAGATTAGTGTAGGG | 2203 |
| hs132684614 | TCTACTTAAAAAGGTTAAGGAGG | 2204 |
| hs132693177 | GCTTTCTACCCTAACAATAGAGG | 2205 |
| hs132691423 | TCTCCTTTTGTCTTTTAGTGGGG | 2206 |
| hs132685680 | GATTCTGGCTACTGTTTGAGAGG | 2207 |
| hs132689456 | ACAGCAGTCCTCAGTAACTCAGG | 2208 |
| hs132685042 | CTTAAAATGTTAAGTACTGAGGG | 2209 |
| hs132683345 | TATGTTTTTAAGAGAAGCAACGG | 2210 |
| hs132683574 | GTAGCAATATTTCAGTTCCAAGG | 2211 |
| hs132684477 | GTTTGTGCCACTTTAAACACTGG | 2212 |
| hs132693252 | AGGAACAACAGAGCATTCAATGG | 2213 |
| hs132690659 | CCTACCATTTCAGTCTTGGATGG | 2214 |
| hs132687221 | TATTACACTTTGTTGTCCGCAGG | 2215 |
| hs132692285 | TGAGATTCATCTCCTGGCACTGG | 2216 |
| hs132684805 | CGTTACAGGATACTGTAAAAGGG | 2217 |
| hs132686930 | GAGTCATCCAAATATATCCCAGG | 2218 |
| hs132686975 | CAGGTAGATTGAGCCGGTGAGGG | 2219 |
| hs132685284 | TCCCAGTGAGTCTAACAGCCAGG | 2220 |
| hs132691129 | ACCAATCTAAACATTTCCTAAGG | 2221 |
| hs132686227 | ACTTGAGGCCATGAAATTGAGGG | 2222 |
| hs132689606 | TCACTGTCTAAGCTAGTACTAGG | 2223 |
| hs132684457 | ATTTATTTAGTGCCCGGAAGGGG | 2224 |
| hs132685137 | CTTGGAATTCCTATGCCAGCAGG | 2225 |
| hs132686880 | CAGCTAGTTTTTTTTTCAGGGGG | 2226 |
| hs132691416 | AGCGTTTTCTCGTGTTCAAGAGG | 2227 |
| hs132686586 | CATTAGTCATGGAGTCCTAAGGG | 2228 |
| hs132691678 | CAGAAACGCTCTTTCAATGGTGG | 2229 |
| hs132683616 | AAATATATTACAACTTCCCGTGG | 2230 |
| hs132685796 | TGATGTTATCTATTTAGTACGGG | 2231 |
| hs132683664 | ATTGCTAAGCATGCCCTGTAGGG | 2232 |
| hs132692543 | GGGTGATAGTCGCCAGAGAAGGG | 2233 |
| hs132684142 | TCCAAATGATCAATTTTCCATGG | 2234 |
| hs132692107 | GGGTAGATACATTTTATGAGTGG | 2235 |
| hs132691083 | TATGGTGTGCCACTTGGAAAGGG | 2236 |
| hs132691691 | CATTTTATAGAAGTTGAACATGG | 2237 |
| hs132686125 | TTATCTCAAGGAATAAATAGAGG | 2238 |
| hs132694249 | AGAATGGGAGGATAATAGGATGG | 2239 |
| hs132688767 | TGTATAAGTATGTTTGGCAGTGG | 2240 |
| hs132684283 | GATGCACATTGATTTAACTTCGG | 2241 |
| hs132686309 | GATTTCAAACAGAAACCAGCAGG | 2242 |
| hs132686569 | GCAAGGAAATTACAGACGTTAGG | 2243 |
| hs132684981 | ATTTCGTTGACCCTTAACTAGGG | 2244 |
| hs132685474 | CAGCTGTGTAACATAAAAGCTGG | 2245 |
| hs132692108 | CTCATTTGCATGGCTCTACGTGG | 2246 |
| hs132683508 | ACATTGACTGTAAAGCGAATGGG | 2247 |
| hs132687959 | CCTTGTCTGTGTTACAGCAATGG | 2248 |
| hs132689858 | ATAAGCTCTTGGTTTTCTGAAGG | 2249 |
| hs132691494 | AAGCTGTATAGAATTTAAAGTGG | 2250 |
| hs132690360 | TTTTAATGTGACTCAATACATGG | 2251 |
| hs132690694 | TTTAGCTCTCAAAAGCACATTGG | 2252 |
| hs132692368 | ATATAAGAATGACATTTACTAGG | 2253 |
| hs132684035 | AATCTTACGCCTTTTAGAAGAGG | 2254 |
| hs132690391 | GAGTTGGGACGGATAATTGAAGG | 2255 |
| hs132683863 | TCTCGCAGTTGAAGGATTCAGGG | 2256 |
| hs132687764 | GCTCACAGTCGCCCCTATGAGGG | 2257 |
| hs132692350 | CTATAGCCTTGACTCACCACAGG | 2258 |
| hs132688472 | ATGCACAGAAAATAAAATGAAGG | 2259 |
| hs132691629 | TTATTCTGTTCTAGGATGAGAGG | 2260 |
| hs132692817 | GATCCTTCCTCTCATAAATGAGG | 2261 |
| hs132687223 | TGTTTGGGATTTCAGTTGGAAGG | 2262 |
| hs132691075 | CCCATGACAAAACTTTCAGCCGG | 2263 |
| hs132687700 | CATTCGGTTAATTTTCAAAGAGG | 2264 |
| hs132692848 | ATTTCTATAATCTATTGCCAAGG | 2265 |
| hs132687261 | GGTAGCTTACTGCTATTTGGAGG | 2266 |
| hs132687070 | GCCGCCCTCGAGCTAGGACATGG | 2267 |
| hs132690475 | AACTTTTGATTGAATCCCAAGGG | 2268 |
| hs132687275 | AGCTTTCTCAATAAGAGTAAAGG | 2269 |
| hs132692615 | TCAGCGATACTACCTGGGTATGG | 2270 |
| hs132692914 | TTTCATCTCTGTAGATGAGGTGG | 2271 |
| hs132689779 | CCTATAGTGCATGCATGCCAGGG | 2272 |
| hs132694100 | TATAAGTCAGAGGGAGGAGATGG | 2273 |
| hs132686693 | ATACTGCATGGAACTCGGGTGGG | 2274 |
| hs132686592 | TTACATCCTATACTTGGCTGAGG | 2275 |
| hs132688066 | AATAGTGTGGGTCAACTGAAGGG | 2276 |
| hs132690110 | ATGGAATCAGGACTATAAAAGGG | 2277 |
| hs132684189 | TCTGAAACACACAACTTGGATGG | 2278 |
| hs132693342 | TCAGATTATCTGCAACCCACTGG | 2279 |
| hs132691080 | TGCAAATGATAGACTCAAGAAGG | 2280 |
| hs132693455 | TGTCTTCTTGTTAAGCGAAGTGG | 2281 |
| hs132687192 | GTGCAATGCCCAGAGCCATAAGG | 2282 |
| hs132693345 | ATGTTCTGAAAGAACACAAAAGG | 2283 |
| hs132689938 | ATACTATTCTGAATAGTACTTGG | 2284 |
| hs132692777 | TTTGTAATACAAATTACGATGGG | 2285 |
| hs132694204 | ATTTCAGTAGACTTACAGAAAGG | 2286 |
| hs132683638 | ATATTGAGTAGGCAGCTGTATGG | 2287 |
| hs132691706 | AAATGCAGCTGGAGTGAGTAGGG | 2288 |
| hs132685432 | GAGCAATGAGTATGTAGGAAGGG | 2289 |
| hs132693439 | CCATAACCAAATGGGATGAAAGG | 2290 |
| hs132688846 | TGCAGGGTCTGGGGATTCTGGGG | 2291 |
| hs132692497 | CCTGTAACTGGAGACAAGAAGGG | 2292 |
| hs132688611 | AGTCTACCTGGATTATTGATGGG | 2293 |
| hs132690262 | CGTTTTTATTAAATGCAACCAGG | 2294 |
| hs132684566 | AGTTTGGAGCTCCATTTTCAGGG | 2295 |
| hs132689810 | TATATAAAGTTTCTTGGTGAGGG | 2296 |
| hs132693891 | ATCTACTCTGCATGAAGCTAGGG | 2297 |
| hs132693287 | GACTGGGGAATATAAAGAAAGGG | 2298 |
| hs132689397 | GATCCTTAAAGAGAAAACTTAGG | 2299 |
| hs132688237 | CAGACCTTTGACACTTACTTCGG | 2300 |
| hs132685234 | CAGGCCATCAAACACCCATAAGG | 2301 |
| hs132690189 | GAAGATGTGAGCTATAAAAGAGG | 2302 |
| hs132688639 | CAAATGATCTTTATGCCCTAGGG | 2303 |
| hs132684131 | TATAAACCACACATCACGTATGG | 2304 |
| hs132694305 | GGAAGCTCACATTTTTTCGAAGG | 2305 |
| hs132693857 | ATAGAGAATTCATGGCCCTCAGG | 2306 |
| hs132691224 | ATATTCCACCTTGAAAAAGCAGG | 2307 |
| hs132691043 | TGGAGGCCTTATCAAACACCAGG | 2308 |
| hs132694171 | TTTCTGCTCACTGGTAGCGCTGG | 2309 |
| hs132688042 | ACTTTCTTTTGCTAAGTAGGAGG | 2310 |
| hs132685873 | GATTCTACTTGTATCATGATGGG | 2311 |
| hs132687031 | ATATTTGGCAATTATAAGCATGG | 2312 |
| hs132691868 | TTAGAGACCGATGAGTGAAAGGG | 2313 |
| hs132684827 | GTTCTATCTGAATAAAGCCATGG | 2314 |
| hs132692510 | GCTTTTTCCTTTGAGAACTGTGG | 2315 |
| hs132686212 | GATGTGTTCAAAACATTATGAGG | 2316 |
| hs132687419 | TCATGCCAAGTTAAAGTGGTTGG | 2317 |
| hs132687035 | CTACTCTCAATTTTCAGATGCGG | 2318 |
| hs132684021 | ATTGTTTCCATCTAAAGTAAGGG | 2319 |
| hs132693051 | ACTGAAGGACAGCGAGTGCATGG | 2320 |
| hs132689263 | GAATGCTTATAAAGAGTGGCAGG | 2321 |
| hs132685975 | TCCTCCCTAATACCAGTGAAAGG | 2322 |
| hs132685346 | TGTTTTGCTTGAAGGAACTCAGG | 2323 |
| hs132686099 | CATTCCTAAGCATATTAAAGAGG | 2324 |
| hs132692026 | CCAAGACTGAATCATAGAATGGG | 2325 |
| hs132686302 | TTTAACATAAGGCTTTAGACTGG | 2326 |
| hs132692866 | CATGGATGTCTCTTGTCATACGG | 2327 |
| hs132683636 | ATTTCACCTCTAAATTACACTGG | 2328 |
| hs132688434 | GGAAGGAGCAGCAGTTCTGTGGG | 2329 |
| hs132685824 | ATATAAAAGGATTCAGTATGAGG | 2330 |
| hs132684673 | TTTGAAAATGGGTCTGAGAACGG | 2331 |
| hs132687215 | TCAAAGAGTACCATATAAGCGGG | 2332 |
| hs132683650 | ATGCTTTAGAAACAGACAAATGG | 2333 |
| hs132687055 | TGCTTAGAAAGATTAGTTGAGGG | 2334 |
| hs132686761 | GAGAGGGAGAGAAAGAGAAGTGG | 2335 |
| hs132687029 | TATTAAAGAAAACAAGGTGTGGG | 2336 |
| hs132692809 | ATATTAAGTATGTGTCCAAAAGG | 2337 |
| hs132691033 | GGAACAGAGGCGTAAATAGCAGG | 2338 |
| hs132684737 | ACAATGTCGTTCTTGAGGGATGG | 2339 |
| hs132687202 | TGCTTTATTGGAGGATCACAGGG | 2340 |
| hs132688897 | TCCTTGTCCATCCCAGTACAAGG | 2341 |
| hs132689766 | TTACTGAGAAAGTGAATGGTTGG | 2342 |
| hs132690934 | TCTCAGTGATTCTTTCGCCCAGG | 2343 |
| hs132692546 | CTTATGGATTGTTTGACTGGAGG | 2344 |
| hs132690063 | TCTGACAGCCCATTAGAGACGGG | 2345 |
| hs132688982 | GTTGAAGTGGGCATGTGGAAGGG | 2346 |
| hs132687129 | CCTCCAAGCTAAAAATTCATGGG | 2347 |
| hs132684713 | GGCATCAATAGCTAATTCTAGGG | 2348 |
| hs132685381 | TCTTTTTTCAAAATTATGCCGGG | 2349 |
| hs132686315 | AAGAAGCAGAAGAAACAAACCGG | 2350 |
| hs132692157 | TTATATGTTAACATGATCAAAGG | 2351 |
| hs132683523 | ATATTATCGATTAGGCCTGTTGG | 2352 |
| hs132692788 | GACAGTGGACCACATTGTATAGG | 2353 |
| hs132684165 | AATTTGCAGCCTTTTGTAGAGGG | 2354 |
| hs132686903 | AACTCATTAGAAAACTAATGAGG | 2355 |
| hs132685935 | TGGCTCTGGAGATTTTATAGAGG | 2356 |
| hs132693811 | CCATGCTGCACAGTACAATTGGG | 2357 |
| hs132688685 | TTAGAGTTCTCAGTAAATGTAGG | 2358 |
| hs132690330 | GCATAATTACATTATTTAAGGGG | 2359 |
| hs132692662 | GAGGCCATTGAACAATTTGAGGG | 2360 |
| hs132685009 | GATTCAAATGGCACAACAGAAGG | 2361 |
| hs132684904 | TTTCACATAGTGGTTGGTGATGG | 2362 |
| hs132685035 | ACATGCATATTTTACTGCCATGG | 2363 |
| hs132689027 | TTCTGATTCCCATTCTCTGAGGG | 2364 |
| hs132686380 | ATTCTACTATTAAGTAATGAAGG | 2365 |
| hs132689586 | TTAGTAAAACTTATTTGCGCGGG | 2366 |
| hs132684584 | ATTTCTGCCATTAATACTGTAGG | 2367 |
| hs132693985 | GACGTACATAAACTACCAATGGG | 2368 |
| hs132689428 | GGTATTACAGAAGCATTGTAAGG | 2369 |
| hs132688412 | CTGCTTTTAGAAAGTAAGCCCGG | 2370 |
| hs132692626 | TCTTCTTAAGCAGCTAGTATGGG | 2371 |
| hs132693770 | TAAAACGGCATGAAAGGAAAGGG | 2372 |
| hs132692648 | GTTTTATGTTGGGTACAGGTTGG | 2373 |
| hs132685204 | ATTCTGCCTAAAGTTCTGCCAGG | 2374 |
| hs132685291 | ATTGGCAGTGACAGCGGAGGAGG | 2375 |
| hs132689856 | TCTTGGTTTTCTGAAGGCTAGGG | 2376 |
| hs132690312 | GAAAATATTACAATAGAAGGTGG | 2377 |
| hs132688969 | TATTGTGAAGGAGCAAATACCGG | 2378 |
| hs132692432 | CCTCTCTCATGGACAGTCAGAGG | 2379 |
| hs132691760 | GAGCAGGACTGTCTAGACTTTGG | 2380 |
| hs132689442 | GTCCGAAAAGAGCAAAGGGCTGG | 2381 |
| hs132683598 | GCATAAATTCTGTGATTAAGTGG | 2382 |
| hs132693723 | AGACTGAGACTGTATCTACTTGG | 2383 |
| hs132684416 | TATTCTGCCTCCAGGATTTGGGG | 2384 |
| hs132686922 | GGGGCTTTTGTTGTGAGGAAGGG | 2385 |
| hs132687245 | GTTAGGCTCCTGCTGAGAGTTGG | 2386 |
| hs132683992 | ATCTCCAACAACGGAAAAGAGGG | 2387 |
| hs132688229 | GATTGATAAATGAGAGTCCTGGG | 2388 |
| hs132690734 | AACTACATTGTGAAGCCTGATGG | 2389 |
| hs132685569 | CACATAACCTCCCATTTCTAGGG | 2390 |
| hs132683692 | TTAGAACTTCTTGAACAAGTTGG | 2391 |
| hs132690183 | AAATACTTGGGAATTTCAGTAGG | 2392 |
| hs132683387 | AAGATAATCAGAGTCACAAAAGG | 2393 |
| hs132685507 | TTAATATGTAACTCATGGCTTGG | 2394 |
| hs132686134 | TAACACCTGAGTTTTTAAAGTGG | 2395 |
| hs132691600 | TGAGCTGTTACAAAAGTGGTTGG | 2396 |
| hs132686133 | GTATTCCACTTTAAAAACTCAGG | 2397 |
| hs132689627 | GTTCATCAAAATACTCGTGTTGG | 2398 |
| hs132690141 | TAATGAAATGAGAATGTAGATGG | 2399 |
| hs132684922 | TCTAGAACAGCATTTCCAAATGG | 2400 |
| hs132688270 | GCAAGACCAAGATTATCATCTGG | 2401 |
| hs132693926 | GCAGGTACAGAAGTAGATCATGG | 2402 |
| hs132692122 | GACAGTGGTGAGTTTTAGTAGGG | 2403 |
| hs132684715 | CTCATATAGTTTAAAACACACGG | 2404 |
| hs132685494 | TTTTATTCAGTAGATATCACTGG | 2405 |
| hs132693175 | AAGCAGCGCCTCTATTGTTAGGG | 2406 |
| hs132693713 | ATTACAGTATATTCTACAGTTGG | 2407 |
| hs132694225 | CTTTTCCATTGCTACCAAAGAGG | 2408 |
| hs132694207 | GCTGAATTTACCTATTTGGTAGG | 2409 |
| hs132692488 | ATATTGCAGCAACATTATGAAGG | 2410 |
| hs132687401 | CTATAAACTTTAAGGGAGCAGGG | 2411 |
| hs132690421 | ACCTTCGGAGAAAAACGAATAGG | 2412 |
| hs132688267 | ACATTTCCTCTTGATAAATGAGG | 2413 |
| hs132683681 | AAGATTTCCAGTCTGAAAAGAGG | 2414 |
| hs132686066 | GAGAAAGGATGTTTTAGCTGTGG | 2415 |
| hs132693113 | ATCCCATATTCCTATTACCCAGG | 2416 |
| hs132688269 | ATAATCTTGGTCTTGCCTGCCGG | 2417 |
| hs132689151 | GGAAAAATACTTGGCCAGATGGG | 2418 |
| hs132690134 | ATAAATATGAAAACCATACATGG | 2419 |
| hs132694343 | GTCTGGTTAAGGAACACTATTGG | 2420 |
| hs132687849 | AATATCAACCGTCTTCTCACTGG | 2421 |
| hs132692302 | TGCTAGAAATTTGTGAGCAAAGG | 2422 |
| hs132688195 | ATTCTGAGCATGCCCAGTGGTGG | 2423 |
| hs132689768 | CAGATTACTGAGAAAGTGAATGG | 2424 |
| hs132687151 | TTTAATTATACAGCTACCCTGGG | 2425 |
| hs132687050 | CTAATTATACTCATGCTACAAGG | 2426 |
| hs132690737 | GATGCCACCTAATCTCCATCAGG | 2427 |
| hs132690062 | CTCTGACAGCCCATTAGAGACGG | 2428 |
| hs132686263 | TATGAAAAAAAAATAGGATAGGG | 2429 |
| hs132689867 | CAGTATGGGAAATCAAAAAAGGG | 2430 |
| hs132688428 | TCAGTGAGTTTATTAGGCTGAGG | 2431 |
| hs132685180 | TAGCTAAGTATTAGGAAGGGTGG | 2432 |
| hs132687058 | TGTTTCACATTTAAGAGGGAAGG | 2433 |
| hs132685141 | TGCTGTATGCCTGCTGGCATAGG | 2434 |
| hs132684440 | ATAATTTAGTGCAAAGGTGTAGG | 2435 |
| hs132684571 | AATTGAGTGGTGCACGTCGAGGG | 2436 |
| hs132693012 | ACTTTAAAGTCGTTGTGAAGTGG | 2437 |
| hs132690697 | AGGAGTTTAGTGATATCAGTTGG | 2438 |
| hs132692565 | CCATCATTCCCATGGCCTGTAGG | 2439 |
| hs132694051 | TCGGTCCAGCAACAATAAGCTGG | 2440 |
| hs132691722 | GCTCATTACATTCTATATTGTGG | 2441 |
| hs132691011 | GCTAATTAATGGGGACCCATGGG | 2442 |
| hs132693719 | TATTTGATGCCGTATGTGCTCGG | 2443 |
| hs132685427 | GGTCTATTCATTCAGGCTAAGGG | 2444 |
| hs132692801 | TATATGTTTAGCCTAGAGGCAGG | 2445 |
| hs132685998 | GTTTTCTCTTCCGCTAAACTGGG | 2446 |
| hs132690917 | AGTATGAGCATGCAACGGTTAGG | 2447 |
| hs132687515 | CCCTTAAAGCTGATCGGCAAAGG | 2448 |
| hs132692127 | CGTTGCACACGTCCTCAACTAGG | 2449 |
| hs132689751 | CCAGGGTGGAAAATAAGCTTAGG | 2450 |
| hs132694149 | TCAGTTTTATAGTCTTCAGTGGG | 2451 |
| hs132688557 | TTGAGAGTAAAATTTGAGCATGG | 2452 |
| hs132693398 | GCCATTTGCCAAGTGCCAAATGG | 2453 |
| hs132690286 | ATACAGGGTATATAATTTGAAGG | 2454 |
| hs132692203 | CATTGTGGGATTCCTCCCTATGG | 2455 |
| hs132693459 | TAAAAAGTGGAGCTTGCAAAGGG | 2456 |
| hs132687579 | TTTCTTGTTCATCTATTGTGAGG | 2457 |
| hs132690116 | GCTTTTGGCTAAGACTGTCATGG | 2458 |
| hs132689553 | TTGTAGCCATGATAAACAAATGG | 2459 |
| hs132685221 | TTTACATTTCATTCTTTAGGGGG | 2460 |
| hs132693171 | GAACCATTAGTACTTACAATGGG | 2461 |
| hs132687207 | TTTCAAAATTGGCTATTCTGTGG | 2462 |
| hs132689019 | AGATGTATTGATTTCTCCAAGGG | 2463 |
| hs132689400 | GTTTTCTCTTTAAGGATCTGTGG | 2464 |
| hs132692458 | CCTCTGAGCCCTCAAGGTGGAGG | 2465 |
| hs132685852 | TTATGCAAAGCTCCTATTGTGGG | 2466 |
| hs132689952 | CCTATGCAAGTCTAGAGAATGGG | 2467 |
| hs132685115 | CATTTTATACTAACTATGGGTGG | 2468 |
| hs132693028 | GCACCCATGTCAATATGATCAGG | 2469 |
| hs132690252 | ACTAATAGATGTTTTACGTAGGG | 2470 |
| hs132685214 | TGAAAACCTGGAAAAACTAAAGG | 2471 |
| hs132687779 | GGAAATAACAGACAAAAGAAAGG | 2472 |
| hs132685893 | AGACAGATTTTAGGTTAAAGGGG | 2473 |
| hs132694286 | TTTCATTAATAATCAACAGCTGG | 2474 |
| hs132692430 | GAGGCCAGACTTGCAGGGCAGGG | 2475 |
| hs132686694 | TACTGCATGGAACTCGGGTGGGG | 2476 |
| hs132691764 | AATTCAGCCTGGTATTACTCTGG | 2477 |
| hs132684234 | CTTTCACTGTGGTAACTGGAAGG | 2478 |
| hs132685786 | TATCAAGATACTTGAAAGCAGGG | 2479 |
| hs132692462 | TTGTGAACTCCTCCACCTTGAGG | 2480 |
| hs132688314 | ATAATTAGCTTATGATCAGATGG | 2481 |
| hs132685193 | CCACATTGCTGGTACCGTTGGGG | 2482 |
| hs132684454 | ACATGTATTTATTTAGTGCCCGG | 2483 |
| hs132686770 | CTTGGAATTGAAATGGAAGCTGG | 2484 |
| hs132687675 | ACATAATACAAACTTCACTTTGG | 2485 |
| hs132685350 | AAGGTCCTCTTCATAGCAGCAGG | 2486 |
| hs132683673 | TTATTGTCTGCTCTCTGTAGTGG | 2487 |
| hs132683410 | CTTTCTGCTACCAGTAGAAGTGG | 2488 |
| hs132686894 | TTTCAGATAATTAGGCAGCCTGG | 2489 |
| hs132689648 | AGAGGGGAAATATACCCTAATGG | 2490 |
| hs132685729 | GATTTCACAAATTAAGGAGAAGG | 2491 |
| hs132690403 | TGCATATTCTATTACTGCAGTGG | 2492 |
| hs132686514 | GTAGAAAACTGTGTCATTCGTGG | 2493 |
| hs132684679 | TTATGGGTGTAAAGTGTAAGTGG | 2494 |
| hs132691339 | CTACGTTGTTAAAAATGGGCAGG | 2495 |
| hs132693847 | TAGAGGGAAGAAGGATGCAATGG | 2496 |
| hs132691682 | ATTATCATAATTGAATAAGAAGG | 2497 |
| hs132693116 | TATTTTAGATTTGCTTGTAACGG | 2498 |
| hs132688752 | TTCCAACTCTACACCTCCATTGG | 2499 |
| hs132692266 | TTTGACTTTTTATATTTGAAGGG | 2500 |
| hs132694014 | CCAGACAGTAAAGCTGACTTAGG | 2501 |
| hs132692101 | AGCCCTGGTGATTTTTAGGGTGG | 2502 |
| hs132693853 | CTTTGCTTAGCTCTTCTGGAGGG | 2503 |
| hs132691214 | TTTAATTTCAGGGTTCATGAAGG | 2504 |
| hs132693298 | TTTTAGAATAGGTTACAAGTAGG | 2505 |
| hs132692252 | CAGTAGATCATGTTATGTAAAGG | 2506 |
| hs132686131 | GAGATATTACCCCAGAAGGCTGG | 2507 |
| hs132688583 | GGTCAAAATCAAGATTTGGCAGG | 2508 |
| hs132693196 | ATAGAGACTTCCAAAAAGAATGG | 2509 |
| hs132689508 | CCGCCAATGGAGGTTAGGTATGG | 2510 |
| hs132690113 | GCCAAAAGCAGAGTGGAAGAAGG | 2511 |
| hs132684739 | TGTCGTTCTTGAGGGATGGGTGG | 2512 |
| hs132684061 | AGTGTCATACCTTCCATCAAAGG | 2513 |
| hs132683674 | GACAATAACGATGCTCCTATGGG | 2514 |
| hs132685463 | TGAGGTAACCAGCCAGGCTACGG | 2515 |
| hs132689279 | TGATTTCCATGAGGAAAGCTGGG | 2516 |
| hs132687793 | TCAAAATTAGTTCCAGAAGAAGG | 2517 |
| hs132687171 | ATCTTCTTAAACATTTTCGTTGG | 2518 |
| hs132684592 | GTAAAAAATGAGAGATAGGTGGG | 2519 |
| hs132692720 | TTTATATTACTTGAGGGTGGTGG | 2520 |
| hs132693662 | GTATTATAACTCTTTAGCATAGG | 2521 |
| hs132691049 | TCCTAGCAAAAACTCCCAAATGG | 2522 |
| hs132688392 | TTATGGGCATGAACCAGCCTTGG | 2523 |
| hs132685636 | ATAGAGGGAGATAAAGGAAGGGG | 2524 |
| hs132685307 | GAAGCTTTTTCCCTTAAGGATGG | 2525 |
| hs132685085 | GTTAATAAATGAAGAACTAAGGG | 2526 |
| hs132683701 | CTCTTCATTTAAAAAAGAGAGGG | 2527 |
| hs132693408 | TGTTTTTATTATGCTAGCCATGG | 2528 |
| hs132684204 | TTTGCTATGCACCGGACCCTGGG | 2529 |
| hs132684814 | AATAATACCCACATCAGTAGAGG | 2530 |
| hs132688416 | AGAACACATCAGAAAATAAGTGG | 2531 |
| hs132687668 | CTATTGTTAAACATCAATAGAGG | 2532 |
| hs132692063 | ATTTCTGTAATAAAAAGTATGGG | 2533 |
| hs132692027 | GCCAAGACTGAATCATAGAATGG | 2534 |
| hs132686765 | CACAGAGGCTGAGTTTTGACTGG | 2535 |
| hs132690204 | TTTATATGCCCTTAAAACGCTGG | 2536 |
| hs132689472 | TGTGACCCGACTGGTTCCCTGGG | 2537 |
| hs132686636 | AGTGTCAGATATGGAGGTTGTGG | 2538 |
| hs132694058 | TTATCAGCATCATTCAGCTCTGG | 2539 |
| hs132686479 | ACTGAGGCTATACTTCTGTATGG | 2540 |
| hs132690835 | AGATTATAATTGTTTATAGAGGG | 2541 |
| hs132688303 | TGGCACAGTAAGCCTTTGGATGG | 2542 |
| hs132685237 | AGGATGACAAAGGTCCTTATGGG | 2543 |
| hs132691444 | CTAGTCCTCCCTGAGAATGTAGG | 2544 |
| hs132692641 | AAGAGCCTCCTCGAGGTGAATGG | 2545 |
| hs132688395 | GAGTATTACACACAAAATAGTGG | 2546 |
| hs132690622 | ATTTACCTCATAAAACAGTTGGG | 2547 |
| hs132693691 | TTGTTACATCTAATACTGGTTGG | 2548 |
| hs132686795 | CTTTAATCATGAAAACAAAAGGG | 2549 |
| hs132686101 | GTTAATGTCCTACTAAAGCTAGG | 2550 |
| hs132687553 | ATACCACCACTGTACTGTACTGG | 2551 |
| hs132687026 | ACGTAAGCCACAATTTTACAAGG | 2552 |
| hs132688756 | TTCACCTCTCTCAAGAGGCTTGG | 2553 |
| hs132687296 | TGATTGCATATCTTTCCCATAGG | 2554 |
| hs132685107 | GCTCGATTAGGTTTGGTGGTTGG | 2555 |
| hs132686025 | ATAACTTGAGTGCTTTTCAAAGG | 2556 |
| hs132683745 | CTTGGATAATCTATTAGCATTGG | 2557 |
| hs132694427 | TTTGCAGAGTTTGAAGAGCTCGG | 2558 |
| hs132692325 | TCTGTATATCTGCCTCCTCCAGG | 2559 |
| hs132686987 | TGAATACCAGACAAAAATACAGG | 2560 |
| hs132692855 | ATTGCATAACCAGTTGTCACTGG | 2561 |
| hs132687156 | GCAGCACAATGTATCACCTTAGG | 2562 |
| hs132691036 | GTAGTCATCTTTGTGGTAGGTGG | 2563 |
| hs132688652 | GGATTGTCTAAGTCATTGGCTGG | 2564 |
| hs132688313 | CAGTGAGAGTTGGATAGAGAGGG | 2565 |
| hs132692560 | TTCTTAGTAGCATACCACTATGG | 2566 |
| hs132685118 | ATTACAGCCAATCACAATAGTGG | 2567 |
| hs132685434 | ATAGAGAGCAATGAGTATGTAGG | 2568 |
| hs132690678 | TTAAGGTGTTTCTTACCTGATGG | 2569 |
| hs132691170 | TGCATGACTTGAAGACACTAGGG | 2570 |
| hs132685983 | GTGATCAGTGAAATTTACATTGG | 2571 |
| hs132691420 | AATCTGTCAGTATCTCTCTCTGG | 2572 |
| hs132692410 | GATTCGGTAAATGCCATTTGAGG | 2573 |
| hs132683700 | CCTCTTCATTTAAAAAAGAGAGG | 2574 |
| hs132686936 | TTGGTCAATTTGCAACCCCTGGG | 2575 |
| hs132691427 | GGGAAGGCAACTTAAGCTAAAGG | 2576 |
| hs132686830 | ATAGACTAAAACTTTACATAGGG | 2577 |
| hs132689281 | CTAAAACCCAGCTTTCCTCATGG | 2578 |
| hs132687011 | CCCAGAGCATAAGATTGAAGTGG | 2579 |
| hs132692088 | TTGTAGCTGTGAGTAAAGTAAGG | 2580 |
| hs132684388 | TAGTGCCCAACCAGAGCAAAGGG | 2581 |
| hs132691250 | AGAAATGGTGGCAAAGAGCTAGG | 2582 |
| hs132693230 | ATTGTTGTAAATTTTCCTGAAGG | 2583 |
| hs132687411 | CTTGGGAGAGCCCCGAAAGATGG | 2584 |
| hs132690221 | TAATCTCTAGAGGAGCCATCTGG | 2585 |
| hs132689153 | TATAAAGGTGGAAAAATACTTGG | 2586 |
| hs132687752 | TTATAGTTAGCAAGATAGCCTGG | 2587 |
| hs132685431 | TGCTCTCTATTATACAAAGAAGG | 2588 |
| hs132691963 | TTTTACATATATTGATTGGAGGG | 2589 |
| hs132685591 | ATTGGCATAGCATTACACTATGG | 2590 |
| hs132684475 | CCTTAGATAGTATTATTATGTGG | 2591 |
| hs132688202 | GTAGGCCTCAAGACCTTGAATGG | 2592 |
| hs132686242 | GTAGATGTCACAGCGCAAACAGG | 2593 |
| hs132688384 | GGAGAACCATGCAGTAGGGTGGG | 2594 |
| hs132683972 | CTCCCAGCTCAACTTTGGGATGG | 2595 |
| hs132685715 | AGGTTCTTTTACTTTTAGCAAGG | 2596 |
| hs132683985 | GTGTCAATCAAAATAGTCTTCGG | 2597 |
| hs132688755 | AGAGAGGTGAAGGATATCTCAGG | 2598 |
| hs132693159 | TCTCTGCTCCAATACATACTTGG | 2599 |
| hs132691116 | GTTAAAAATCTGCTAAGTAAAGG | 2600 |
| hs132690951 | CTTCAGCCCCACACCAAACATGG | 2601 |
| hs132692942 | ATCGTCAATGTTGAGCGTATCGG | 2602 |
| hs132690100 | TTTAAGTCAGCACTTAGCTCAGG | 2603 |
| hs132691833 | TCTTTTCAAGAATGATTGCTGGG | 2604 |
| hs132691424 | AGACCCCACTAAAAGACAAAAGG | 2605 |
| hs132686209 | AATGAGGAGGAAAAAATATGAGG | 2606 |
| hs132686585 | TCATTAGTCATGGAGTCCTAAGG | 2607 |
| hs132689025 | GATGTATGCCCTCAGAGAATGGG | 2608 |
| hs132687420 | GTCCTCATGCCAAGTTAAAGTGG | 2609 |
| hs132690023 | ATAGAGTGTGAAGAGGAGATCGG | 2610 |
| hs132686102 | TTATTCCCTTTTCTAAAATGAGG | 2611 |
| hs132683374 | TCATATTGAGCTTTTGGCAGAGG | 2612 |
| hs132689598 | AGAGCCACTGTTCTAAAAGCAGG | 2613 |
| hs132692555 | GATTGAGGCCTGATTCAACTTGG | 2614 |
| hs132683952 | ATCATTATAAGGAGATGAAAGGG | 2615 |
| hs132694421 | GCTGCGTTAGATTTTGGGGAGGG | 2616 |
| hs132693086 | TATTTCTGTCTGTTTGGAGTGGG | 2617 |
| hs132692234 | GCTCAACTGTGTGTTAGGCCTGG | 2618 |
| hs132691268 | GAGTCCAGTTAAAGGTAGCTTGG | 2619 |
| hs132685581 | GTAAGATAGTGTAAGTAAAGAGG | 2620 |
| hs132685416 | CTAAGCATCTTTTTTCAAGCGGG | 2621 |
| hs132691039 | GCAAAGTGTAGTCATCTTTGTGG | 2622 |
| hs132689887 | GAACAGATGTTACGTGGTAGAGG | 2623 |
| hs132686321 | AAGCTTTAGATGCTGTACTTAGG | 2624 |
| hs132685116 | TTACATTTTATACTAACTATGGG | 2625 |
| hs132686579 | TCCTTTGTCTCATATACTACGGG | 2626 |
| hs132690661 | CATCCAAGACTGAAATGGTAGGG | 2627 |
| hs132683943 | TGTCTTCTATGGCAAACCATGGG | 2628 |
| hs132688266 | AAATGTGAGTTTCTCTCAAAGGG | 2629 |
| hs132687561 | CAGGATAGCTTACTTATACAGGG | 2630 |
| hs132688650 | GTCTAAGTCATTGGCTGGAAGGG | 2631 |
| hs132688921 | TTTCTTTCTCAGCCTCCAAAAGG | 2632 |
| hs132694378 | TTTCTTTCCCCTACAATCAGTGG | 2633 |
| hs132694218 | CTACTTAAGTACTAGAGACTTGG | 2634 |
| hs132690339 | TTTGTAAGTTTATCAAACTACGG | 2635 |
| hs132693458 | CTAAAAAGTGGAGCTTGCAAAGG | 2636 |
| hs132684838 | ACCAGTCTTTTAAACAGTATCGG | 2637 |
| hs132687324 | ACTGAGTAATGGAATCTTGAGGG | 2638 |
| hs132693527 | TTTTAAGTCAACAACATACATGG | 2639 |
| hs132683840 | TTTAGTTTGACTCCTCAGCTAGG | 2640 |
| hs132688983 | GGTTGAAGTGGGCATGTGGAAGG | 2641 |
| hs132689133 | CCGCAGCTAATAATGACATATGG | 2642 |
| hs132688486 | TGATGTATAGGAAGCAAAGAAGG | 2643 |
| hs132685174 | CTCTGTAACTTGTTTTAAGGTGG | 2644 |
| hs132684546 | AAGTATTGCCAGAGCTTGAAGGG | 2645 |
| hs132692451 | TGAAAAGGAGTAGGAGGCTGAGG | 2646 |
| hs132692933 | GAGATATGTGCGGCTAACACAGG | 2647 |
| hs132689269 | GGAGCCAGAATAGGGAGCTAAGG | 2648 |
| hs132686100 | AGTGCCTCTTTAATATGCTTAGG | 2649 |
| hs132684438 | TCTAGCCTCCACTCTAGGATTGG | 2650 |
| hs132688302 | GCTGTGGCACAGTAAGCCTTTGG | 2651 |
| hs132690267 | ATTGGAATATTTTCTGGGGAAGG | 2652 |
| hs132685589 | AACTTAATATTTGCAAAACTGGG | 2653 |
| hs132693972 | CCTCACACCCAACTCCTCCTAGG | 2654 |
| hs132686576 | TTCCATAGTTGATTAGCGTATGG | 2655 |
| hs132689443 | AGGTGTCCGAAAAGAGCAAAGGG | 2656 |
| hs132693138 | TGTTTGTATTATAGTCCAAAAGG | 2657 |
| hs132691838 | AATCTGTTACACTAGAGATACGG | 2658 |
| hs132691770 | AGTTTTGTCCATATCATAGCAGG | 2659 |
| hs132683791 | GTGTATATCCATAAAAAGAATGG | 2660 |
| hs132685164 | TATCAAAACTAAGTGCAAATGGG | 2661 |
| hs132692563 | CTATGGCCCCATCATTCCCATGG | 2662 |
| hs132687514 | TGATCGGCAAAGGAAGAAGCTGG | 2663 |
| hs132691497 | TTAAATAGAGCAAGTATGCTTGG | 2664 |
| hs132683988 | TATGAAACCCCCATAGGCTACGG | 2665 |
| hs132684562 | TTGCAACCAAACAAATCCTTGGG | 2666 |
| hs132685863 | ATTCATGTATTATAAAAGGCTGG | 2667 |
| hs132693365 | AAGAGATTAATGGCAAGAAGAGG | 2668 |
| hs132686917 | GTTTGACACCAATAACCTATAGG | 2669 |
| hs132688382 | AGAACCATGCAGTAGGGTGGGGG | 2670 |
| hs132689608 | TCTGAGCAACATATTACAATGGG | 2671 |
| hs132689076 | TTTCAGAATAATAAATAGTAGGG | 2672 |
| hs132685450 | ATATATCTTTCAAAAATAGCTGG | 2673 |
| hs132683407 | GGTAGCAGAAAGAATGAGGTTGG | 2674 |
| hs132688975 | GACATCTGAGGAGGAACAAAGGG | 2675 |
| hs132692175 | ATATGCATATAAGATGTCATTGG | 2676 |
| hs132686777 | GAGGAATCAGAAAACTGAAAAGG | 2677 |
| hs132687639 | GATGATGTATCTTTGATTGAGGG | 2678 |
| hs132689566 | GTTATCATAAATCCTGTCCTAGG | 2679 |
| hs132691068 | TTAGTTTAAAAGAACTCTGTAGG | 2680 |
| hs132683729 | GCTTGATCTTTCATAAACACTGG | 2681 |
| hs132685286 | TCCTGGCTGTTAGACTCACTGGG | 2682 |
| hs132684653 | CTTCAAGGGCACAGATTACAGGG | 2683 |
| hs132683604 | ATTGAAGAAATGTATTAGAGTGG | 2684 |
| hs132694338 | TTACGTATTCCTCTTAGAAAGGG | 2685 |
| hs132684504 | GGAGGAAAGCAGTTTTGCATTGG | 2686 |
| hs132692163 | ATATCTAATGTTTCATCACATGG | 2687 |
| hs132686964 | TGCACCTGTTTCTTCCACTCCGG | 2688 |
| hs132691390 | GATATTTTTTATACTATCAAGGG | 2689 |
| hs132693828 | GAGCCTTTAAAATACCATGTAGG | 2690 |
| hs132684604 | GTTTCCTTTTGTTCTCTGGAGGG | 2691 |
| hs132691585 | TTAGCATTGTTATTCCGTCTGGG | 2692 |
| hs132685106 | ACTTGCTCGATTAGGTTTGGTGG | 2693 |
| hs132684169 | TATTGATGCCCCTCTACAAAAGG | 2694 |
| hs132693232 | CCCAATTGAGTGTTTTCCAAAGG | 2695 |
| hs132686824 | TTAGTTTTAATGGCCCAAAAGGG | 2696 |
| hs132683665 | AGGGCTCCTCAATTGTTGCATGG | 2697 |
| hs132687281 | TACTGCAGAACAATTATGGCCGG | 2698 |
| hs132683753 | ATTTATTTCTGTACTAAGATCGG | 2699 |
| hs132684067 | AGCTATTTAGGCTTGGTCGCCGG | 2700 |
| hs132689010 | TCAGGGATTCACAAGAGAGCAGG | 2701 |
| hs132691873 | ACAGACTAGTTCTTAAAGATAGG | 2702 |
| hs132690745 | TTTCTTGTGTAGTAATAACTTGG | 2703 |
| hs132686829 | AATAGACTAAAACTTTACATAGG | 2704 |
| hs132686578 | ATCCTTTGTCTCATATACTACGG | 2705 |
| hs132688970 | GCAGTTAACATTCATATGAAAGG | 2706 |
| hs132692570 | CTACAGGCCATGGGAATGATGGG | 2707 |
| hs132693366 | AGAGATTAATGGCAAGAAGAGGG | 2708 |
| hs132692965 | AGGAGCTGCAGCTTTTCAAAGGG | 2709 |
| hs132692657 | CATCCCCTCAAATTGTTCAATGG | 2710 |
| hs132688920 | GGAAGTCAACAAATTGTCAATGG | 2711 |
| hs132688506 | TATCAATCATCGCTGAGAAAAGG | 2712 |
| hs132686966 | GCAACCGGAGTGGAAGAAACAGG | 2713 |
| hs132686325 | AAAAAATTATTCCAGTTACATGG | 2714 |
| hs132689585 | ACTTATTTGCGCGGGTAATGAGG | 2715 |
| hs132693747 | AGAATCATTTTCCAAGCAGATGG | 2716 |
| hs132688558 | TTATACTTATATTCAAGCACAGG | 2717 |
| hs132690504 | TATCTCATACACCTTTTGCTGGG | 2718 |
| hs132686591 | TCTAATTTACATCCTATACTTGG | 2719 |
| hs132693674 | TCTGGGTTTTGCATGACAGCTGG | 2720 |
| hs132683412 | GCCGCAGGTATGTCATTCATAGG | 2721 |
| hs132689345 | GATCTGTGAGAGATGGGAATAGG | 2722 |
| hs132685723 | TTAAAAAAAAAGAAGCCTCTCGG | 2723 |
| hs132688034 | GCCTTTGACCATATTCTGAAAGG | 2724 |
| hs132687297 | GATTGCATATCTTTCCCATAGGG | 2725 |
| hs132685700 | TATCTAAATGTGAAGTTGGCGGG | 2726 |
| hs132693510 | CCTGGATTATTTCCATCTATGGG | 2727 |
| hs132685944 | TTCTGAGCTGCCTTAGCAAAGGG | 2728 |
| hs132683693 | AGTTTACATTATTTGCTCATCGG | 2729 |
| hs132688519 | ACAGCATAATTTTCTACATACGG | 2730 |
| hs132686771 | TGTGGCCCAAAAGAAAAGATAGG | 2731 |
| hs132690579 | GCTGCATTAATCATAATGCTTGG | 2732 |
| hs132684505 | TAATTCTGAGGGCGTTTTGGAGG | 2733 |
| hs132687753 | TTTTGTGTTTAGAAATGCTAGGG | 2734 |
| hs132683442 | TTATTTTTATTCAGTATATGTGG | 2735 |
| hs132692154 | ACACCTTTTTAAATACACCTTGG | 2736 |
| hs132687967 | TTTAAGTGACTGTCTATTGGAGG | 2737 |
| hs132690432 | GTGTTGACTCACTCAGTGTTGGG | 2738 |
| hs132684346 | CTTACCTTACTTGCAAAGGATGG | 2739 |
| hs132689185 | ACAAAAAGTTAGTTTTCTGTAGG | 2740 |
| hs132691745 | AAAGACATACTAGGATAAAGTGG | 2741 |
| hs132688578 | TTAACATCAGAAAGAACGTTGGG | 2742 |
| hs132683487 | TTAATGATAAACATTAGATAAGG | 2743 |
| hs132683953 | GATGCATATGAGATTATTGGAGG | 2744 |
| hs132685743 | CAATCTAGAGGAAATGGCTTCGG | 2745 |
| hs132690261 | GGAAATATTTTCATGAAACCTGG | 2746 |
| hs132690328 | ATTTAAGGGGAAAAAGGTGTTGG | 2747 |
| hs132690763 | GTGTCATCCTAAGAAACAATTGG | 2748 |
| hs132693173 | TGCTGCCTGCTGTATCTCACTGG | 2749 |
| hs132691781 | TCACTTGAAGATTTTTAGTAGGG | 2750 |
| hs132686690 | GCAAGATACTGCATGGAACTCGG | 2751 |
| hs132686371 | TTCTTCAAGGATGTGTTGTAGGG | 2752 |
| hs132688862 | TGACAAGTGATCCTCAAAACAGG | 2753 |
| hs132687084 | ATAACAAATTAAGATCTAAAGGG | 2754 |
| hs132683913 | GGAATTCACAAACACAGATAGGG | 2755 |
| hs132685061 | CATATGTTCTGTACATCAGCCGG | 2756 |
| hs132689120 | AAGCTGGTAAACCTCATTGTAGG | 2757 |
| hs132690842 | CATTGTGGATGTAGAGTCATTGG | 2758 |
| hs132690051 | GGGTGACCACAGTTTAAAGAAGG | 2759 |
| hs132692400 | ATATGCATACCTCTTAAAATGGG | 2760 |
| hs132688463 | CATAGGATCACAATTCATCTAGG | 2761 |
| hs132688161 | ATCCCTCACGTTCTTCAGGTTGG | 2762 |
| hs132692935 | ATTTAATTAATCTTCAGTGATGG | 2763 |
| hs132685333 | TTAAAAAAATACAATGGTAAGGG | 2764 |
| hs132694315 | CTACAGGGTTATTTTGTGGTTGG | 2765 |
| hs132683567 | TATGTCTAATGGGTGCTCAATGG | 2766 |
| hs132688138 | TGGATGTAGTAGTTGAGTAGTGG | 2767 |
| hs132689494 | TTATGCTCATCTCTAGGTATGGG | 2768 |
| hs132690126 | AATAATATGGGACACCGTAATGG | 2769 |
| hs132691750 | TGTAAAATGATGAAAGCAAAGGG | 2770 |
| hs132691651 | GCTCTTTTGGTGTGATCAAGGGG | 2771 |
| hs132683425 | GCTGCTTGAAATGACTAAACAGG | 2772 |
| hs132685897 | GCAAAGCTTGAAATAGCAAAAGG | 2773 |
| hs132686178 | GTAAAATATGACAAAACTCTAGG | 2774 |
| hs132692980 | GATACAGTCTAGGGGTGGACAGG | 2775 |
| hs132687687 | CAGCCCTCTACCCTAAATAAGGG | 2776 |
| hs132691410 | GTAAACTATTGTAGCTCTAAGGG | 2777 |
| hs132688923 | GAAACTTGATAGCCTTTTGGAGG | 2778 |
| hs132688405 | ATTAAGCTCTACATTGGCTAAGG | 2779 |
| hs132691694 | AATCTGAAGGACAAGAAGCTTGG | 2780 |
| hs132684523 | TCTGAAACACTGAAGATCAATGG | 2781 |
| hs132683490 | TTTTGGAGCATTATAAAGGAAGG | 2782 |
| hs132687597 | ATACATAGCAAGACATGTATTGG | 2783 |
| hs132687721 | GTGTATGCAACTAAGATGATTGG | 2784 |
| hs132687194 | GGGATGGCTGGGGGGAATGTGGG | 2785 |
| hs132693526 | GTAGTGTTTGCAGCATGAAAAGG | 2786 |
| hs132687392 | TAGAAAGGATATTTCTAGAGAGG | 2787 |
| hs132684879 | AATTTTTGAGAATGGAAGCTGGG | 2788 |
| hs132686422 | ATTACTTTCGATCTCAAGACTGG | 2789 |
| hs132692476 | TGGCTAAAACATCTATAGAAAGG | 2790 |
| hs132691768 | CATTCTGCATATATTTAACATGG | 2791 |
| hs132687844 | GCTCCATTTAAAACTATGGCAGG | 2792 |
| hs132693937 | TGATGCCGAAAAGAACATATAGG | 2793 |
| hs132692295 | GAGAATATTGAGAAATAAGGTGG | 2794 |
| hs132688962 | GTATTACCAGCCAAGTGCCTTGG | 2795 |
| hs132692176 | TTGTGTTCTAAATTCAAAGAAGG | 2796 |
| hs132688631 | GGAGGCCCCAATACTGTTGAAGG | 2797 |
| hs132694321 | GTATAGTGTGTTACAGAACTTGG | 2798 |
| hs132685965 | ATTGTGAAACAATCTCAAATAGG | 2799 |
| hs132689351 | ATAGCAGTCAATGCTTATATGGG | 2800 |
| hs132692348 | CTAATTTGTTGCCCATGTCAGGG | 2801 |
| hs132687596 | CTTGCTATGTATGGCCAAACGGG | 2802 |
| hs132690782 | ATTTGATTCGAATTTAAATGAGG | 2803 |
| hs132691327 | AGGAAAATTGCAGAATGCAGAGG | 2804 |
| hs132693333 | GCTCCATGCATTTTTAAGTACGG | 2805 |
| hs132692424 | GGCTTTAAAGATCTAAACTAAGG | 2806 |
| hs132690539 | GATTATCAACTAAGGCTGAATGG | 2807 |
| hs132694143 | GTAAAACTTTACTTGTATGTTGG | 2808 |
| hs132691479 | AAGAGAGTATCCATCTCCTAAGG | 2809 |
| hs132683524 | GGATATGGGTGACTGCCAACAGG | 2810 |
| hs132692726 | TTGTTTGCTTGATTTATACATGG | 2811 |
| hs132693226 | AAATAACTCTTTAAAGGAAAGGG | 2812 |
| hs132684801 | ATAATTGAGTTAGAAGGTAGAGG | 2813 |
| hs132687581 | TGCCAGCGTGATTTCTTCAAAGG | 2814 |
| hs132690821 | GAGTACAATTGGCTCCTAGAAGG | 2815 |
| hs132688009 | CTAGCTCCCTGCCACAAAGATGG | 2816 |
| hs132693922 | TTAGTTCTTCTGCCATACATAGG | 2817 |
| hs132683609 | GTTGGAAAAACAGTGCCATCTGG | 2818 |
| hs132689674 | TTCCAAATTTAAATTCCCATTGG | 2819 |
| hs132693943 | AACTCCTTGTCTCTTTTGGAAGG | 2820 |
| hs132685876 | ATCCTTCTATGAGCAAAAGTTGG | 2821 |
| hs132686836 | ATTTTACTGCCAGTTTCAGCAGG | 2822 |
| hs132691620 | TATTCAACAGTCACAGAAAGAGG | 2823 |
| hs132690599 | ATAGAATTCAAGCAATTTGGAGG | 2824 |
| hs132690596 | AAACTAGCATATTTTCCCATTGG | 2825 |
| hs132691432 | AGGTGGCTGTTAATGATAAGAGG | 2826 |
| hs132690628 | GTTGGAATAGCAATAGAAAAGGG | 2827 |
| hs132693688 | AATTTTATTTTCTAACCTGTTGG | 2828 |
| hs132688455 | TGTAATTTAGGTGAAATTGTTGG | 2829 |
| hs132692362 | CTGTTTGTTTTCTAAGCAAAGGG | 2830 |
| hs132687339 | GCCTTTGTTGTTGCCTTCAGGGG | 2831 |
| hs132693310 | ATATTTTTATTACAAGTATGTGG | 2832 |
| hs132691155 | GGAAAATCAAACCAAGCAAAAGG | 2833 |
| hs132686079 | AGCTGATGAGATTTTAGAAGAGG | 2834 |
| hs132689244 | GCACAGAAATGTAGATTTCGCGG | 2835 |
| hs132690234 | TTCTGATAACCCCTTCGAATGGG | 2836 |
| hs132688666 | CTTGATGAATTCAGAATCTAGGG | 2837 |
| hs132686421 | CCTTGAAATTGCTAATACAATGG | 2838 |
| hs132684137 | TCTTATCTATATGATGGGATGGG | 2839 |
| hs132692853 | AGAGACTAACCAGTGACAACTGG | 2840 |
| hs132687263 | TTCTTTTTGTAATAGGAGATGGG | 2841 |
| hs132687586 | GACATATTCCTGACTCCAGCAGG | 2842 |
| hs132691896 | ATATAATTCTTATTATTTCAGGG | 2843 |
| hs132684232 | CCACAGTGAAAGAAACAAACAGG | 2844 |
| hs132687649 | CCATTAACCTTATCTTTGAAAGG | 2845 |
| hs132684605 | AGTTTCCTTTTGTTCTCTGGAGG | 2846 |
| hs132689331 | GTAAGTTGTTGCTAAATTGTGGG | 2847 |
| hs132683397 | TTATGGGGAATTTAAAAGTGTGG | 2848 |
| hs132683994 | AACCATGATATCTCCAACAACGG | 2849 |
| hs132694073 | TTTTGAGCAAACGTTTATAGAGG | 2850 |
| hs132683792 | ACAGTAATTGGCACTGAAAGAGG | 2851 |
| hs132689799 | TAAATCTTAGACTAAAATGTTGG | 2852 |
| hs132692040 | ATTCCAGATAAGAAGACCCTTGG | 2853 |
| hs132686601 | CTTGCTTTACTCTTAAGCACTGG | 2854 |
| hs132688955 | TATATTATGCCCAAGGCACTTGG | 2855 |
| hs132693950 | TTACTTTCTTTAATCTACAAAGG | 2856 |
| hs132683634 | AGGTCTCCAGTGTAATTTAGAGG | 2857 |
| hs132687214 | TTCAAAGAGTACCATATAAGCGG | 2858 |
| hs132691375 | ACATAGACAAAGAAATAAGTAGG | 2859 |
| hs132690347 | GCAGCGTGAAAAAATCCTACAGG | 2860 |
| hs132694322 | CAGTACTTAAAAGTATTAAACGG | 2861 |
| hs132694083 | ATATTGCAATTAGTATCTATAGG | 2862 |
| hs132691728 | GTTTCCAAACCGGAACACTTTGG | 2863 |
| hs132685355 | TTCTTAGCAGAAAAACTCATAGG | 2864 |
| hs132684888 | TCAATACTATTAACAACCCCAGG | 2865 |
| hs132691017 | TCCTCACTATGAATTAGATTAGG | 2866 |
| hs132684291 | ATATTCTGCACTCCATCGTCAGG | 2867 |
| hs132690722 | CCAAGGTATAATCTATTTGAGGG | 2868 |
| hs132686758 | AGAGAAGTGGAAGGTTTAGAGGG | 2869 |
| hs132685792 | CTTCAAGCCCCCAGTGAAGTAGG | 2870 |
| hs132689349 | CTTGTTTCACAACATTTATGTGG | 2871 |
| hs132690926 | CAAAAAATCGACTCTTGGAATGG | 2872 |
| hs132693618 | TCTGACAAGTTGGCTTAAAAGGG | 2873 |
| hs132688696 | CTTTCCCTCACAGATCCCTCAGG | 2874 |
| hs132687768 | GCATCCAAATACCCCTCATAGGG | 2875 |
| hs132689808 | ATGTATCTGTTTATACAAGTTGG | 2876 |
| hs132683887 | TTTTCCATCTCTCATTCAGATGG | 2877 |
| hs132691064 | CTTTTGTTGTGCACGTATATGGG | 2878 |
| hs132689026 | GGGCATACATCCGTGTTACTAGG | 2879 |
| hs132685001 | ATAAGGGCAAATTAAAATGCAGG | 2880 |
| hs132688147 | CTGGGCAGAGAAGTCATGCTTGG | 2881 |
| hs132686143 | ACAGTGTTACATTTAATGCTAGG | 2882 |
| hs132688316 | AGCTTATGATCAGATGGTTAGGG | 2883 |
| hs132693890 | TATCTACTCTGCATGAAGCTAGG | 2884 |
| hs132687894 | AATAGACTATTTTGAAGCAAAGG | 2885 |
| hs132683815 | AGTACATTACAGAAAAAGGCTGG | 2886 |
| hs132692671 | TAGGCACTGTGCAAGTTAGTTGG | 2887 |
| hs132685067 | GTGTGTGTGTGTATTGTAGCAGG | 2888 |
| hs132691811 | ATTGTAAAGTCAATAAATAACGG | 2889 |
| hs132685785 | TTATCAAGATACTTGAAAGCAGG | 2890 |
| hs132684669 | AATTCTGCTCTTGAGAAAAGAGG | 2891 |
| hs132685572 | TTTGTCACAACCCTAGAAATGGG | 2892 |
| hs132689033 | GGTGTAACAAAAAGTGATAATGG | 2893 |
| hs132684489 | CCATCATTTGCAGGGCTGGAGGG | 2894 |
| hs132694181 | ATGGAGATTGTAATATTTGGTGG | 2895 |
| hs132691812 | TTGTAAAGTCAATAAATAACGGG | 2896 |
| hs132687684 | ATTCCCTTATTTAGGGTAGAGGG | 2897 |
| hs132689825 | TTACTTGCCTTTGTAGGTAGAGG | 2898 |
| hs132683402 | AGTCTCTAATAGCAAACAAAAGG | 2899 |
| hs132689053 | AGGTCAGTCACTGGACCCTCAGG | 2900 |
| hs132691948 | CTGACTTTATTTTGTCCCTAGGG | 2901 |
| hs132687771 | GGCTTAGTCCTCAATAAGTAAGG | 2902 |
| hs132693705 | GCTGTGTCTATGGGGTTATAGGG | 2903 |
| hs132684969 | TGTGTGGGAAACCCTGAGAATGG | 2904 |
| hs132692005 | GGTTTCCAACAAGAGCCCTCCGG | 2905 |
| hs132688288 | TCTACTCTTGGGCTTATTCGTGG | 2906 |
| hs132694267 | AGAAGGTGTGAAAGAGAAGTGGG | 2907 |
| hs132692537 | GTAAGGATTTTGAAACTTGGAGG | 2908 |
| hs132688804 | AATTCATGATTTTAGTTGGAGGG | 2909 |
| hs132690157 | CAGTTCCCATTAGTGAGGAATGG | 2910 |
| hs132692545 | TTATGGATTGTTTGACTGGAGGG | 2911 |
| hs132685656 | CCTGTCTCCTAAATTTTGCATGG | 2912 |
| hs132692909 | ACAAAAGCTTACATTCACTTTGG | 2913 |
| hs132691901 | ACAAGTCTACTGGAAGACTTTGG | 2914 |
| hs132684104 | TCATCATCCGGGATTCTTGTAGG | 2915 |
| hs132686249 | TTTTTTTTGTGTGTGTTGGGGGG | 2916 |
| hs132692647 | CAGCCAGCTTTCCAGAAGGCTGG | 2917 |
| hs132686810 | ATGTTCGTAACTGAGAGTTAGGG | 2918 |
| hs132692781 | TGTACATAAAAAACTGGCCTAGG | 2919 |
| hs132693059 | TGTCAGGGTCCTGGTGATAATGG | 2920 |
| hs132685030 | AGAAACAGACAAGATTACTTTGG | 2921 |
| hs132685047 | TATAATTTTTCCTAGAATGAGGG | 2922 |
| hs132690594 | TCTCTTTAGTTAAGTCCAATGGG | 2923 |
| hs132688916 | TACGTTATTTAGCTCCCTTAGGG | 2924 |
| hs132685472 | TTTTTACCTGAGTTGAGAAAAGG | 2925 |
| hs132693663 | ATTCATAAGAAATTTTTCAATGG | 2926 |
| hs132690104 | GAGCTAAGTGCTGACTTAAAGGG | 2927 |
| hs132689588 | TTTTCATTCCTAATGCCCTAAGG | 2928 |
| hs132690237 | CACTTTTAGTATTAAGTAGAGGG | 2929 |
| hs132687243 | TATTGTAGCCAGATCTTTGGTGG | 2930 |
| hs132684617 | TTAAAACGTGTATTTAAAAGTGG | 2931 |
| hs132687921 | TGCCTTATACTACCTGACTCTGG | 2932 |
| hs132685415 | CCTAAGCATCTTTTTTCAAGCGG | 2933 |
| hs132684707 | CAGAATCTTCAACATACAAATGG | 2934 |
| hs132694248 | ATATAATCCATCTTTTAAGAAGG | 2935 |
| hs132693611 | AGATGACAAGTGAATCTCATAGG | 2936 |
| hs132687417 | GATTTCCAACCACTTTAACTTGG | 2937 |
| hs132687049 | TAGCAGTGCTACTAAGTGAATGG | 2938 |
| hs132684540 | TCATATGGCAAACTAAAGAAAGG | 2939 |
| hs132689453 | GTGGGAAGTACAATAGCAACTGG | 2940 |
| hs132693779 | GTATACAATTGGATTCTGTCAGG | 2941 |
| hs132685150 | TCTTTCACTTAAAATAGCTCTGG | 2942 |
| hs132684541 | CATATGGCAAACTAAAGAAAGGG | 2943 |
| hs132683819 | TTAAAATATCTTAAGCAGTCAGG | 2944 |
| hs132686595 | TGATATCCTCAGCCAAGTATAGG | 2945 |
| hs132686610 | TGCTCCCCTCAAAAGTCCCTTGG | 2946 |
| hs132690663 | GTATCCATCCAAGACTGAAATGG | 2947 |
| hs132691870 | AGTTTTTCCCTTTCACTCATCGG | 2948 |
| hs132687877 | TGAAGAATAAACAGGCCTTTGGG | 2949 |
| hs132686842 | GGGAAGATCAAAGAAAAATCAGG | 2950 |
| hs132684293 | TCGGGCATAAAGCATTTCCTTGG | 2951 |
| hs132691275 | TCTTACTTAAAGGACTGATTCGG | 2952 |
| hs132685270 | TCAGCACTAGCAGCACTTGTTGG | 2953 |
| hs132687146 | ATTACTTTGTCAGTACTTCAGGG | 2954 |
| hs132684833 | TTAAAGCCACATCCACTGATAGG | 2955 |
| hs132691012 | TGCTAATTAATGGGGACCCATGG | 2956 |
| hs132685201 | GCACACTAAAAGGCCTATAGAGG | 2957 |
| hs132686866 | TGAGAGAGAAGACTTGCAAAAGG | 2958 |
| hs132683687 | ATTATTTCCTCTTTTCAGACTGG | 2959 |
| hs132693684 | TGCCAGTTATGGGCTTAAGATGG | 2960 |
| hs132684736 | ACGTACAATGTCGTTCTTGAGGG | 2961 |
| hs132694063 | TTATGTTGCAATTTGAAGACAGG | 2962 |
| hs132691969 | TTACAGTCATAGTAGGTTGTGGG | 2963 |
| hs132684039 | CATGGGACCCGCCTGTTCAGAGG | 2964 |
| hs132692015 | ATAAATTTACAAGGGGCCTATGG | 2965 |
| hs132684290 | CACTCCATCGTCAGGTAAGAAGG | 2966 |
| hs132686847 | AATCAGGTCATGGGGCTTTGCGG | 2967 |
| hs132683646 | ATACTTCTTTGCAAACCAAAAGG | 2968 |
| hs132692327 | GCCTCCTCCAGGAAGATTTGAGG | 2969 |
| hs132691704 | CTCCAGCTGCATTTATATAGAGG | 2970 |
| hs132685036 | ATTTGAGGATGATATTCAACAGG | 2971 |
| hs132685582 | ACTAGCATCTGACAGCCTATTGG | 2972 |
| hs132687442 | GTTATTCATTCAGCAAAAGAAGG | 2973 |
| hs132694292 | TATTTGGTCCCACTGATGAATGG | 2974 |
| hs132691900 | TCTAGTCTAAACAAGTCTACTGG | 2975 |
| hs132693945 | GCAACACATACAATAAATGTAGG | 2976 |
| hs132686487 | GATCATTCATCCCTAGGAACAGG | 2977 |
| hs132684518 | CATTTTGATGAAGCGATGTAGGG | 2978 |
| hs132685793 | TACTTCACTGGGGGCTTGAAGGG | 2979 |
| hs132687204 | GTATGACTCTGCTTTATTGGAGG | 2980 |
| hs132688477 | AAACACACAGGACAAGAAGATGG | 2981 |
| hs132688663 | TATTTACCAATTACTGACATAGG | 2982 |
| hs132684847 | CTACGCATGCATAGAAAACTAGG | 2983 |
| hs132692977 | TGCAAGAAAGATACAGTCTAGGG | 2984 |
| hs132689649 | ATTAGGGTATATTTCCCCTCTGG | 2985 |
| hs132687091 | CTGATCATTTATCCTTTTAGCGG | 2986 |
| hs132689933 | TATTCTCTCATCTCATAAAGAGG | 2987 |
| hs132691301 | TCACTTGTATTTATACAGAATGG | 2988 |
| hs132687460 | CCAGGAACATGCTATATAGCTGG | 2989 |
| hs132692691 | CTTTATTGTAGCATGACTTAGGG | 2990 |
| hs132685098 | TCAGTTCTTACTTCGTAGAATGG | 2991 |
| hs132690345 | ATGAGTTTGGTAAGAAAAAACGG | 2992 |
| hs132688208 | CCTGCTCCATAACAGGCAATAGG | 2993 |
| hs132693519 | AAATGAACAGACTTTGGTACTGG | 2994 |
| hs132686006 | TGAATAATATTGGTTAATATGGG | 2995 |
| hs132684299 | AGCTCTGGATTGTTTAAGGATGG | 2996 |
| hs132689524 | TCACTTAATTAATTAAAGCCTGG | 2997 |
| hs132692369 | ATAATTGCTGACATTTAAAACGG | 2998 |
| hs132691269 | AGTCCAGTTAAAGGTAGCTTGGG | 2999 |
| hs132690203 | TTCTTAAGCACAATTCTGATAGG | 3000 |
| hs132692249 | ACATTTAAAATGAAAACAATGGG | 3001 |
| hs132683431 | TTTACTTGAAAACTGTTCCCTGG | 3002 |
| hs132692520 | AATAAGTGATAAATAACAACAGG | 3003 |
| hs132693665 | TTCAATGGCAAAATGAGGCTTGG | 3004 |
| hs132685008 | CTTTGGCAATAGGATTCAAATGG | 3005 |
| hs132687232 | ACCATAATGTTGTTGAAGATGGG | 3006 |
| hs132684868 | GGGCACAGCTACCAGGAAAAGGG | 3007 |
| hs132688169 | GTGTGGCTCTGGTTTTCGCCAGG | 3008 |
| hs132685087 | TTTCTTTTTCTTACTAGTAGAGG | 3009 |
| hs132693554 | TAACAGTATTAAGATCATAAGGG | 3010 |
| hs132689032 | CATTTTTTAATACTCAAAATGGG | 3011 |
| hs132694185 | CTTCTCATATCCCTATGTTCAGG | 3012 |
| hs132691859 | CTGGAGCATTTAGAGTAAAAGGG | 3013 |
| hs132686969 | TGAGAACACCTCACTATTCACGG | 3014 |
| hs132687390 | AACCTCATCATATATAATGATGG | 3015 |
| hs132693697 | TCAGCTAGAAAGCAGCTAATGGG | 3016 |
| hs132683715 | TTTCTGTCTGTGCTAATACTTGG | 3017 |
| hs132687999 | ACTAGCCAGAAGGAGCAGTATGG | 3018 |
| hs132694340 | TTTTTCTGAATGTTAGTCCATGG | 3019 |
| hs132683581 | GCAAACGCCACTTCTTTCTCAGG | 3020 |
| hs132684047 | TCTGAACAGGCGGGTCCCATGGG | 3021 |
| hs132691277 | TTGGTTAGTTTATCAACCCCTGG | 3022 |
| hs132691303 | TGAGCATGAGTCTTACAGTATGG | 3023 |
| hs132691731 | AGTAGCAGAACTTTTGTTGGTGG | 3024 |
| hs132691726 | ATAACTATACCAAAGTGTTCCGG | 3025 |
| hs132692845 | AGACTAGCTCTTATTACCCTTGG | 3026 |
| hs132685230 | GTAAATTATTTTCATACAAGTGG | 3027 |
| hs132689326 | AATCCCCCAAGAGTGCTCTATGG | 3028 |
| hs132692944 | CTGTGCCTATCCTAATAAGCAGG | 3029 |
| hs132694268 | TAGAAGGTGTGAAAGAGAAGTGG | 3030 |
| hs132693373 | CTTACCACAGATATATTCCTAGG | 3031 |
| hs132691997 | GCCTAGATCCTGACTGTCACAGG | 3032 |
| hs132683326 | TCTGACTTTTAGATGAAAAGAGG | 3033 |
| hs132692257 | TGATATTTGAAGTCAAGAACCGG | 3034 |
| hs132690841 | TAAGTATCTTAAAACCCTAAAGG | 3035 |
| hs132687916 | TTTCAGACAAGAAAAGCTTTGGG | 3036 |
| hs132685423 | GCAAATCTATCTAGAAAAAAGGG | 3037 |
| hs132690603 | AATTTTAAAGGGAATTAAGATGG | 3038 |
| hs132690674 | GCATGTGTGATAAATAAATTGGG | 3039 |
| hs132687289 | ACTCTTTGCAGCTCTTCAGCTGG | 3040 |
| hs132686294 | TTTGTACTATCAGCTATAGATGG | 3041 |
| hs132690499 | GAGTCTGTCACTTTAACAAATGG | 3042 |
| hs132691244 | TGATGATGCTGAGGACTAGATGG | 3043 |
| hs132692663 | GGAGGCCATTGAACAATTTGAGG | 3044 |
| hs132683637 | GTAGGCAGCTGTATGGAAACAGG | 3045 |
| hs132688402 | TTAATTGTAATCCTTAGCCTTGG | 3046 |
| hs132684999 | AAGAATCCTTCCTTTCATAAGGG | 3047 |
| hs132692244 | ATGTTGTCCTTTTTCTTGCATGG | 3048 |
| hs132694138 | TCTTGCCTGAAATTGGTAAGAGG | 3049 |
| hs132683884 | TGAACTATCTTTATCAAATGTGG | 3050 |
| hs132686078 | CTAAAATCTCATCAGCTCCTAGG | 3051 |
| hs132685395 | GAGATTTTAACATATTAGAATGG | 3052 |
| hs132694198 | GCTACCCTCTTCTCTCTTCGTGG | 3053 |
| hs132690634 | CTTGCCCTCTGATGTCCAGCTGG | 3054 |
| hs132689621 | TTAACGATGACTGAATTGATAGG | 3055 |
| hs132684937 | GTAACTCCTGGTACACTTGTAGG | 3056 |
| hs132693748 | GATGCTGGCTTCCATCCTACTGG | 3057 |
| hs132690056 | TTAAATGTCTGAAAATGGATTGG | 3058 |
| hs132685325 | AAGAAGCTATAGAAATAGATTGG | 3059 |
| hs132689894 | TATCTCTTATATGCATCAGTTGG | 3060 |
| hs132688035 | ATCCAATTGTCATTTCTAAGAGG | 3061 |
| hs132686466 | TACCAGATTGAGGATATTAGAGG | 3062 |
| hs132690502 | GGTGTATGAGATAAAACATAAGG | 3063 |
| hs132692761 | AAAGGTGATGTAGGTGTGAAGGG | 3064 |
| hs132693683 | GCCCATAACTGGCAACCAACAGG | 3065 |
| hs132689024 | GGATGTATGCCCTCAGAGAATGG | 3066 |
| hs132692437 | ATAAGGACGTGTCTGCTTGTGGG | 3067 |
| hs132692436 | TCCTTATGAGATGCATGCCCTGG | 3068 |
| hs132690129 | GCTGAGCACAATTACCATTACGG | 3069 |
| hs132684602 | TTTTGTTCTCTGGAGGGAGGTGG | 3070 |
| hs132685108 | CGATTAGGTTTGGTGGTTGGAGG | 3071 |
| hs132691367 | GTCAGCCAGAAAATATATATAGG | 3072 |
| hs132684802 | GGTCAGATAATTGAGTTAGAAGG | 3073 |
| hs132689253 | TTTTTTTCCTTGTTGAGTAAAGG | 3074 |
| hs132684595 | CAGTCTATGCAGAGATTCAATGG | 3075 |
| hs132683512 | CACTCTCTTGGAAATGAGAAAGG | 3076 |
| hs132683800 | TGGCCTAGGGAATAAATAATGGG | 3077 |
| hs132691755 | TCTGCCGCTGATGGTTTGTTCGG | 3078 |
| hs132684793 | CTCTTCCTCTTTTCTCACATGGG | 3079 |
| hs132691153 | TTTCAAATGATCCTTTTGCTTGG | 3080 |
| hs132687318 | TTTCTCAATGAACTGAGTAATGG | 3081 |
| hs132690719 | CCTCAAATAGATTATACCTTGGG | 3082 |
| hs132684859 | ATATGAGAGTCTCTGAATAAGGG | 3083 |
| hs132689727 | TAATACTTTGGAAATTGAAAGGG | 3084 |
| hs132684598 | ACCTCCCTCCAGAGAACAAAAGG | 3085 |
| hs132688609 | AGTGTGGCTGGGAGTCTACCTGG | 3086 |
| hs132693009 | TGTTTCCACTGGGAATATATAGG | 3087 |
| hs132692401 | GTATGCATATGTACATAAATCGG | 3088 |
| hs132683982 | GATTGACACCCGTAGCCTATGGG | 3089 |
| hs132693303 | CCAGTAGGTGGGTCACTCATTGG | 3090 |
| hs132690099 | ACAAGTGCAGATTTTAGCCTTGG | 3091 |
| hs132692080 | TTTTTTCATATATCATCAATGGG | 3092 |
| hs132689920 | GATTATCATGTGCGTTTCCATGG | 3093 |
| hs132685376 | AAGCTGAAAGGTAAACAAATCGG | 3094 |
| hs132685789 | ATAGAACTTTCTATGTATAGAGG | 3095 |
| hs132693368 | CCAGAGAAAATGAAGCTAAAGGG | 3096 |
| hs132694260 | TATCACAAAAAGAGAAATAAGGG | 3097 |
| hs132684931 | CATAGTATGCAGATTTTAAGTGG | 3098 |
| hs132685055 | AATTCCCTGGTTTTGCTCCCCGG | 3099 |
| hs132688408 | GTTTATTATTGATAATCTAAAGG | 3100 |
| hs132686605 | AGATGAACGTTTCTTTTCCTAGG | 3101 |
| hs132684850 | TGTAACCACTTACACACTAATGG | 3102 |
| hs132692588 | GTACAGTGTTCTTTATCGTATGG | 3103 |
| hs132686480 | GTTCCCAGATTCCTGTTCCTAGG | 3104 |
| hs132686855 | GCTGTGAAGGTTCAATAAATAGG | 3105 |
| hs132689846 | ACGTTCCCATATAATAGAAATGG | 3106 |
| hs132688189 | CCACTGGGCATGCTCAGAATAGG | 3107 |
| hs132693920 | TCTGCCATACATAGGTCTTAGGG | 3108 |
| hs132694087 | AGTGTCTCCTTTGATAGTGTTGG | 3109 |
| hs132691761 | AATAGTTAAGATGTTGTATGAGG | 3110 |
| hs132683544 | ATTGATTGATAAGTTATGCCAGG | 3111 |
| hs132687540 | GGAGGTTGACAAGGGAAAAAGGG | 3112 |
| hs132694336 | TTTAACTCACCCTTTCTAAGAGG | 3113 |
| hs132684779 | CTACAGCAAGATGTTCCCTTAGG | 3114 |
| hs132691090 | GCATGTCATATACCTGGTTATGG | 3115 |
| hs132689763 | CCTGCTTGAGCTATTGTTGGAGG | 3116 |
| hs132693480 | TTAATATTGTCAAAAAAGCTTGG | 3117 |
| hs132684496 | CTACTTTCATATTTTTAGGTTGG | 3118 |
| hs132691094 | AAGACCTCCCTCTCTTAGCTGGG | 3119 |
| hs132690819 | GGGAAATCTGAGAGTACAATTGG | 3120 |
| hs132686111 | AGTTAACCTTTCCATCCTCTTGG | 3121 |
| hs132691644 | ACGATATGTGCAAAAATTCAGGG | 3122 |
| hs132687870 | TCTAGTTAAGGTTTTTCAGCAGG | 3123 |
| hs132687595 | TCTTGCTATGTATGGCCAAACGG | 3124 |
| hs132685358 | AGGTAGCTCACAGAATAATCAGG | 3125 |
| hs132691281 | TTACATTGTAATGCTTGTAATGG | 3126 |
| hs132692029 | TTTTCTATCACAGATTTACATGG | 3127 |
| hs132692971 | GAAGGCCTAGTGAGGAAAGATGG | 3128 |
| hs132691677 | TGACAGAAACGCTCTTTCAATGG | 3129 |
| hs132689006 | ATAAAATGAAATAAAAGCTTCGG | 3130 |
| hs132691079 | CTATCATTTGCAAAGCACTATGG | 3131 |
| hs132689157 | GAATACACATTAGAAACAATTGG | 3132 |
| hs132692248 | TGTAAATCCTCTCATTAAGATGG | 3133 |
| hs132694309 | TCTTGAATGGTCACTTAAAACGG | 3134 |
| hs132689726 | GTAATACTTTGGAAATTGAAAGG | 3135 |
| hs132693042 | TAGATTATAGAAGTTTACATTGG | 3136 |
| hs132693868 | CACTAGCTACACTATTTTGGAGG | 3137 |
| hs132683736 | AGAGTCAGTCTTTTAGAAAAGGG | 3138 |
| hs132691142 | AGACAGCTGATTATATAAGTTGG | 3139 |
| hs132689884 | ATTAGTCACGTACATACATATGG | 3140 |
| hs132687598 | AGTGCACAAGTCAACCCGTTTGG | 3141 |
| hs132690169 | GAGTGAAAGTGAGGCATTGAGGG | 3142 |
| hs132692957 | TTTTTTTTCCTGAGAGTAAGTGG | 3143 |
| hs132686821 | GTGGCTTTGGTAAGGTAAGTTGG | 3144 |
| hs132685165 | GATATTTGAGGCAAATCCTTCGG | 3145 |
| hs132683623 | CAGCCATGTTAATAATTAGTAGG | 3146 |
| hs132683836 | CAATAATGTTCCTCTTTTAGCGG | 3147 |
| hs132683776 | CCTACTAAACGAATTATAAAGGG | 3148 |
| hs132685550 | AAATCATCAGTAATACATATAGG | 3149 |
| hs132693265 | GTAAACATTTTATAGACAAAAGG | 3150 |
| hs132689749 | ATCATTGTGGCCAGCTCCCAGGG | 3151 |
| hs132693951 | TACTTTCTTTAATCTACAAAGGG | 3152 |
| hs132688643 | TGATAAGGTTAACAATCCTTGGG | 3153 |
| hs132694002 | TTTGAATTACTATTTTTCACTGG | 3154 |
| hs132694294 | GTTTAGGCTTGCTTCATTTGCGG | 3155 |
| hs132690140 | TTCATTACATGGATAAGCATTGG | 3156 |
| hs132691577 | TGTTTATTTGGAATTCCCCTTGG | 3157 |
| hs132690477 | GCTTCTCTTATTCAGACTGTTGG | 3158 |
| hs132687250 | AGGTTTGTACTACTACATATAGG | 3159 |
| hs132691790 | AAGCCTATCAAAAGTGAAATGGG | 3160 |
| hs132685138 | AGGAATTCCAAGCATATAATGGG | 3161 |
| hs132693933 | ATTAGAACCAAATTTGGAATGGG | 3162 |
| hs132688400 | GATAGCTTAAAGCTCAGAAATGG | 3163 |
| hs132686851 | CTAAATGCATGTACAAACTAAGG | 3164 |
| hs132693435 | AGTATAGTGCTTTATAAAAAGGG | 3165 |
| hs132694381 | GTAAGACAAAACTCATTAAAGGG | 3166 |
| hs132690680 | GATGGAGCTTGCCTTCCATCAGG | 3167 |
| hs132691968 | TTTACAGTCATAGTAGGTTGTGG | 3168 |
| hs132689118 | GTTATAACACAGGTAACTATAGG | 3169 |
| hs132694303 | CCATAGTTACTTTTAAAAGAAGG | 3170 |
| hs132688841 | TTATTGTATCTATATAAGATTGG | 3171 |
| hs132686046 | ATAAAGAATGAACTATCTATAGG | 3172 |
| hs132691443 | GTGGCATTCATGTTAGCCTTAGG | 3173 |
| hs132688467 | CCAAATAAGTAGTAAACAAAGGG | 3174 |
| hs132691732 | TGTAGTAGCAGAACTTTTGTTGG | 3175 |
| hs132693329 | TATTTTATAAGTTATTTGAATGG | 3176 |
| hs132689046 | GGATAAAAACAGAATGTTGATGG | 3177 |
| hs132683354 | GATTTGAAGGAGGCTAGAATAGG | 3178 |
| hs132685406 | AAAGTTATGGTACAATTCCTAGG | 3179 |
| hs132685393 | TTTCTAGGCAATCTGCTAGCAGG | 3180 |
| hs132686181 | GTCTGTGTTTGAATTAAGAATGG | 3181 |
| hs132687854 | GGACTTTTTCCCTATCAGTCAGG | 3182 |
| hs132684982 | GATTTCGTTGACCCTTAACTAGG | 3183 |
| hs132684776 | TTAATGAATTTTTATCCCCCTGG | 3184 |
| hs132684079 | GCGGAAAGCCGGGGTAACCGTGG | 3185 |
| hs132693449 | CCATAGTGCCTGACAAAACCTGG | 3186 |
| hs132689702 | TTATAAGCATTCTTCTGCCTGGG | 3187 |
| hs132683722 | TTAAAACAGAAATAAAGTTTCGG | 3188 |
| hs132690851 | TATATCTGACCTTTATTGACAGG | 3189 |
| hs132685739 | TGTAGCTATCACTTACTTCGTGG | 3190 |
| hs132693084 | CTGTCTGTTTGGAGTGGGCAGGG | 3191 |
| hs132692461 | TGTGAACTCCTCCACCTTGAGGG | 3192 |
| hs132687601 | TCAGTGATATTCAGTATGATTGG | 3193 |
| hs132692651 | GGAGATACAGAGTTTTATGTTGG | 3194 |
| hs132693909 | ATTCATGTGCAACCTAAATACGG | 3195 |
| hs132692186 | GATAATTACTTCACTCTACATGG | 3196 |
| hs132693434 | ATACTGTTTTTAGTTGCAAATGG | 3197 |
| hs132686653 | TAGCAAAGAGGAGTAGGTATTGG | 3198 |
| hs132690695 | TTAGCTCTCAAAAGCACATTGGG | 3199 |
| hs132691822 | TATTTTCCCCCCATGGGTAGTGG | 3200 |
| hs132692894 | ATAGACTGTAGGAAGTATAATGG | 3201 |
| hs132683656 | ACACAGGGCCTGGATTATAAGGG | 3202 |
| hs132689474 | CACTCTTCCTGTGACCCGACTGG | 3203 |
| hs132693332 | AGCCTATTGTAGCTGCCTAATGG | 3204 |
| hs132683492 | TTTAGGACATATTTAGAAAGTGG | 3205 |
| hs132684081 | CTCCTTCTCGCGGGGCTCGAGGG | 3206 |
| hs132690066 | GTACACACCCCGTCTCTAATGGG | 3207 |
| hs132686259 | AAATATATCTTGACAGCAAATGG | 3208 |
| hs132691729 | TTTACACTATGTTTCCAAACCGG | 3209 |
| hs132686988 | GTGCACTCATTTATGCAAACTGG | 3210 |
| hs132690921 | GGCAGCGGTGGCTAATACTTAGG | 3211 |
| hs132684843 | TTTTTGTAGGAGCTTGGGCTAGG | 3212 |
| hs132683734 | GTCAGTGCTGAAAACATGTTTGG | 3213 |
| hs132688239 | ATAATAGGTTATTGGAAGGTAGG | 3214 |
| hs132684552 | GCAGTGGTGATTCCAATCATTGG | 3215 |
| hs132689011 | GTGCACACTCAAGCTGTTGATGG | 3216 |
| hs132690356 | GCTTCATAAATTTCTTTTGGTGG | 3217 |
| hs132685173 | ACAAGTTACAGAGGGTTAAACGG | 3218 |
| hs132686948 | GGCTGGCTACACACCTTCATAGG | 3219 |
| hs132686021 | GCTACTTAAGAGAAGGGCTTGGG | 3220 |
| hs132687848 | AAGACGGTTGATATTTCTTAGGG | 3221 |
| hs132693816 | GTACATGGATTCAGGCATATTGG | 3222 |
| hs132691970 | GTAGGTTGTGGGAGAGATGCTGG | 3223 |
| hs132693441 | GTACAAACACCATAACCAAATGG | 3224 |
| hs132684238 | GGTACTTGTCAGGTTTATAAGGG | 3225 |
| hs132692868 | GATAAAAGTCAACAGCTGATTGG | 3226 |
| hs132693518 | ACAACAAAATGAACAGACTTTGG | 3227 |
| hs132688610 | GAGTCTACCTGGATTATTGATGG | 3228 |
| hs132684422 | AGATCTTTGCATGCAGGCATTGG | 3229 |
| hs132694034 | TTGGCTGCTGACCCATTCATGGG | 3230 |
| hs132692660 | AATGGCCTCCTATTGACCTTAGG | 3231 |
| hs132685359 | GATTATTCTGTGAGCTACCTTGG | 3232 |
| hs132686583 | AAGACTAGTCAGATCTCTAATGG | 3233 |
| hs132690993 | TCTTTCCTATTGAAGGCTATGGG | 3234 |
| hs132687356 | AATCAAAGGCTGATTTTAAGTGG | 3235 |
| hs132686314 | ATTAGTGTATTTTTTCAGTCCGG | 3236 |
| hs132686389 | ATAGGAGACGTCCAAATGATAGG | 3237 |
| hs132687608 | TACTACCCTAGAGAGCAATTAGG | 3238 |
| hs132692636 | TTAGTTGTTAATTTAAGTAATGG | 3239 |
| hs132684528 | AGGCAAACGGAAACTGCATTTGG | 3240 |
| hs132683447 | TTTATATTCCTTAGTCCCTCAGG | 3241 |
| hs132690725 | ATTGAAGTTTATCAATTAGCAGG | 3242 |
| hs132686941 | GAATTTATCATTCTTCTGAATGG | 3243 |
| hs132685608 | CTAAATTATCTGATTTTCATGGG | 3244 |
| hs132684197 | TGTTGTGGTTCTGGGTACTAAGG | 3245 |
| hs132688677 | GAGAGCTTCTTATTGAGAAAGGG | 3246 |
| hs132691374 | ATTATAGTACGCACTAACTTAGG | 3247 |
| hs132691088 | ATGACATGCAGCATTTTAAAGGG | 3248 |
| hs132687485 | TTTCTTGCTGGCTTCTGGCGTGG | 3249 |
| hs132692209 | CATTTTGATGTCATTACCATAGG | 3250 |
| hs132688660 | GGCTTGAATGTGACATTGACTGG | 3251 |
| hs132687958 | CTTGTCTGTGTTACAGCAATGGG | 3252 |
| hs132691882 | AGTTTCTTAGTTTTGAGCTATGG | 3253 |
| hs132686426 | TCTTGATCTTTGAATGAAGTTGG | 3254 |
| hs132685456 | CTACTAAATGGAACATTGAATGG | 3255 |
| hs132689748 | AATCATTGTGGCCAGCTCCCAGG | 3256 |
| hs132692021 | TTTTATTGCCAAAGTTTCCTAGG | 3257 |
| hs132685647 | CAAATGTTATGTTTGTTGCCAGG | 3258 |
| hs132693781 | ACAGTCCTTTTTATACATAGTGG | 3259 |
| hs132689101 | AACTAACTCATTGTTTAAAGAGG | 3260 |
| hs132683713 | TTTAATGTTTAAATTTTGAATGG | 3261 |
| hs132689183 | GGATTCCTTCTCTTACAAACTGG | 3262 |
| hs132689804 | AACTCAGGCATCATTCAGATTGG | 3263 |
| hs132694384 | TGTATCAGCTTGTTTCAGATAGG | 3264 |
| hs132687300 | TCAAACTTGCTGTAACCCTATGG | 3265 |
| hs132685534 | TGAATTCTAATGACTGCAATGGG | 3266 |
| hs132691591 | TCAAACTTGACCATATAAATCGG | 3267 |
| hs132683347 | TTATTTCTCATATTGACTAAAGG | 3268 |
| hs132683320 | ACATGGGCCTGATCTCACTATGG | 3269 |
| hs132689697 | TATAGACTCTGATTGAGAAATGG | 3270 |
| hs132689445 | TCTACAGTTCTTTTGCCCTCTGG | 3271 |
| hs132690816 | ATAAAACCTCAGTATGAAAACGG | 3272 |
| hs132684718 | TTATCAGGATATGTTTATAAGGG | 3273 |
| hs132688782 | CATTAACTGTTTCTATCAAAGGG | 3274 |
| hs132688377 | CACAACATTTAGCAACAGATTGG | 3275 |
| hs132684288 | GACGATGGAGTGCAGAATATGGG | 3276 |
| hs132691451 | GTAGGGGATTTGGGGTTGAATGG | 3277 |
| hs132692890 | AGAAAAAAGAAAAAAATAAGAGG | 3278 |
| hs132690423 | TCCCAGATCTGAGTCCTGTAGGG | 3279 |
| hs132687109 | GGGGCCACTAGTGTAAAAAAAGG | 3280 |
| hs132685746 | GGCCATCTCACAAAGCTCATTGG | 3281 |
| hs132691641 | CTCCGTTACACGTTTACAAAGGG | 3282 |
| hs132685378 | TCTTGTGGATTTACATTGCCAGG | 3283 |
| hs132693773 | TATTGACCTTTAATATAAAACGG | 3284 |
| hs132690897 | TTATACTTTGTTACTTCAAAGGG | 3285 |
| hs132685989 | AACTTTTTATTGTCACTAAGAGG | 3286 |
| hs132690997 | GGAAGCCCATAGCCTTCAATAGG | 3287 |
| hs132686041 | ACATCTTATGACAAATCAATAGG | 3288 |
| hs132690949 | GTGCTGCTGCCCCTCAGCATGGG | 3289 |
| hs132692600 | CCTGCTCTCGTCTTTATAAGAGG | 3290 |
| hs132683705 | GCTTATTTTAAATTTAATGATGG | 3291 |
| hs132691872 | TATGAAATATGTCAAACAACTGG | 3292 |
| hs132693277 | GTTCCCATATGAACACTGTTTGG | 3293 |
| hs132687923 | GCTAAAATGTAAGAGATGTTTGG | 3294 |
| hs132687642 | CACTTTCATTTATTCGGGGGAGG | 3295 |
| hs132683522 | AGAACTGTAGTTTCTCCATCAGG | 3296 |
| hs132685099 | CTACTTCTCAGAAGCTCTGTTGG | 3297 |
| hs132686860 | AGACAGGGCTTAGCTATATTCGG | 3298 |
| hs132691290 | CATTGAATGATATTTACAATTGG | 3299 |
| hs132688235 | CAGTTTATCTCCTAAATATGAGG | 3300 |
| hs132686034 | TTAAGATATTTAGTATATAGTGG | 3301 |
| hs132686738 | AATCAAGGCTAAGCTGCATTAGG | 3302 |
| hs132694153 | CTCCATATTCCTAAGCCAACAGG | 3303 |
| hs132688845 | CCCTGCAGAATTGGGATTGAGGG | 3304 |
| hs132687224 | GGATTTCAGTTGGAAGGCATTGG | 3305 |
| hs132686949 | CTTTTTGCTGATTTCCCTGTTGG | 3306 |
| hs132689165 | CAAAATGTATTGCTGTGAAAGGG | 3307 |
| hs132687066 | GGACATGGAACTTACTTGTTCGG | 3308 |
| hs132685940 | CAATATTTCTTTAGGTCAAAGGG | 3309 |
| hs132688489 | GCAACAGAATAGCAGATTAAGGG | 3310 |
| hs132692328 | CCTCCTCCAGGAAGATTTGAGGG | 3311 |
| hs132689899 | TGTTCTTTACACTTTTCAAATGG | 3312 |
| hs132686956 | TGTAAGAGAAAAGTACCAACAGG | 3313 |
| hs132690577 | TATTAAATAATCAAACAAGTTGG | 3314 |
| hs132694383 | GTATCAGCTTGTTTCAGATAGGG | 3315 |
| hs132685486 | TCACCGGCCATTTTCCTTTGAGG | 3316 |
| hs132684624 | GCAAACATTTTGATCAAAGTTGG | 3317 |
| hs132687615 | TTAGGTACTGTCATAGTGTTGGG | 3318 |
| hs132685127 | TTATCAGTTTGATTCATTAAGGG | 3319 |
| hs132683955 | TCCTTTGCATCTAATATGAATGG | 3320 |
| hs132692164 | TTTTAACTTAAATCATTGAATGG | 3321 |
| hs132688441 | GGAAGTGTGAATAAAAGTTAGGG | 3322 |
| hs132685854 | GCTCTTTACTCCAACAGAATAGG | 3323 |
| hs132685575 | TATTATGGATTTACAAAATGAGG | 3324 |
| hs132687229 | TTAATTTCCTCCAAAGCCTTGGG | 3325 |
| hs132691388 | ATTATATTAAAAAACTAGATTGG | 3326 |
| hs132685601 | AAAATATCCCTGATTATCATAGG | 3327 |
| hs132694160 | GTAACAGACACAAGGCTTAAGGG | 3328 |
| hs132687230 | TTTAATTTCCTCCAAAGCCTTGG | 3329 |
| hs132683962 | TTTGCCCCGGAGCCCGGCATTGG | 3330 |
| hs132686266 | TAAGTATTAGTTCTGTTGGTTGG | 3331 |
| hs132683439 | TTAGAAAGCTAATTTTATATGGG | 3332 |
| hs132685240 | CTCTCTACTGAAGTGATTGAAGG | 3333 |
| hs132689904 | CACATTACTTGGAAATTAAGTGG | 3334 |
| hs132689268 | GTTAAAAGGGAGCCAGAATAGGG | 3335 |
| hs132691869 | CATCGGTCTCTAAATAAACTTGG | 3336 |
| hs132686995 | CAAGCACTGTTGGTTTTCATAGG | 3337 |
| hs132689266 | CTGTGTTTTGATAGTTAAAAGGG | 3338 |
| hs132683403 | ATATTTAGCAAAAGTCATAAAGG | 3339 |
| hs132692310 | TGCCAGGGAGATGAAAATTAGGG | 3340 |
| hs132685132 | TTATAAGCCGGTCTCACAATTGG | 3341 |
| hs132693914 | TGTATCTTTTTTTTCCAAAACGG | 3342 |
| hs132685073 | GTAAAATCTGATTTTCTAAGTGG | 3343 |
| hs132687427 | CTTTTTATAGTGGTGGGGGGAGG | 3344 |
| hs132691637 | ACTCAGTTATAGGAAGTAACAGG | 3345 |
| hs132683291 | AAAACACTAACACATCATAATGG | 3346 |
| hs132686741 | CTCATTACTCTTTAACCAAAAGG | 3347 |
| hs132685690 | TGTTCATTAATGACTGGCTCTGG | 3348 |
| hs132690136 | TACATTCTCATTTCATTACATGG | 3349 |
| hs132683932 | TGGTGTCTAGCAAAGTTAAAGGG | 3350 |
| hs132685315 | GTATAGAACTTTGTATTGTATGG | 3351 |
| hs132693103 | GTATTATATGTAAGTCTCTTCGG | 3352 |
| hs132691300 | AATTTACTCTCAAATTAAGTTGG | 3353 |
| hs132692355 | GCTCTCCCGCACAATGGCATTGG | 3354 |
| hs132685266 | ATTTTTTTAGTGCAGTGTTTGGG | 3355 |
| hs132689082 | GTAAAATAAATATTTAGAATGGG | 3356 |
| hs132693250 | CTGTTGTTCCTTAGTATTGAGGG | 3357 |
| hs132690549 | GAACTGGAGTTCAATTTGTTCGG | 3358 |
| hs132689996 | ATACAGTAGTCAGTTGAAATGGG | 3359 |
| hs132687908 | CCTGTTCATGTATTTTTGAATGG | 3360 |
| hs132688786 | TGTTGATCAGTCTCACCTTATGG | 3361 |
| hs132694356 | CTATGTAATACAGAATCTTTCGG | 3362 |
| hs132693903 | GAAGTAATCAACCTTGGAATAGG | 3363 |
| hs132684923 | ATATAAATTATACATTTAAGAGG | 3364 |
| hs132684014 | CTTTTCATGACTTTTCCCATTGG | 3365 |
| hs132691024 | TCAAGTTGTTTCCTGGGTGTGGG | 3366 |
| hs132688908 | TATTTTTTAAACAGATCAACAGG | 3367 |
| hs132687652 | AATGCATTTCAATAAATATGAGG | 3368 |
| hs132686772 | GGCCACACTTGGAATTGAAATGG | 3369 |
| hs132685304 | TTACAGCTTTGTGAAACAATTGG | 3370 |
| hs132686607 | GTATTTCAGGATTTCACATCAGG | 3371 |
| hs132688824 | TTAGTCTTATCCATCTTGCTTGG | 3372 |
| hs132684935 | GTTTTAATCTGTTATACTGCAGG | 3373 |
| hs132685051 | ACCGTCAGAGTAAGTCTTAAGGG | 3374 |
| hs132683391 | TGAGCCTTCTTTAATGGTGCTGG | 3375 |
| hs132683876 | ATGTTTCTCAAGGCAGGTTAGGG | 3376 |
| hs132687020 | CCAAGAACTGCAGCTCTACTTGG | 3377 |
| hs132688264 | TGATAAATGAGGTCAGATATTGG | 3378 |
| hs132689818 | ACTTATTGTTGGCTTTAAAAGGG | 3379 |
| hs132694306 | CGAAGGAGACAATTCACAAAAGG | 3380 |
| hs132687701 | AACTATCTATTAATATCATTCGG | 3381 |
| hs132683690 | ATAATAATACTGATCTCTATTGG | 3382 |
| hs132686671 | TAGTGAACCTGCAAATCAATAGG | 3383 |
| hs132686461 | CTAACTCTTAACCATTTTGAGGG | 3384 |
| hs132684976 | GTGCATTTGCCCCTAGTTAAGGG | 3385 |
| hs132685886 | GCAAGAAATTTCATGTAGTTGGG | 3386 |
| hs132687620 | GCTTTTGTCAAGCTAAAATCTGG | 3387 |
| hs132690535 | TCAGGGCATTCAGATCTATCAGG | 3388 |
| hs132693957 | GGGAAATTACTAATGAATGTTGG | 3389 |
| hs132693148 | ACTGGCACTTTTTAGCTGTAAGG | 3390 |
| hs132690665 | CCTTGATCATATTTTCTACAAGG | 3391 |
| hs132692987 | TTTCTAGCCATTCTGACAATTGG | 3392 |
| hs132690866 | CCAAAACAAATCAGTTTAAGAGG | 3393 |
| hs132683476 | CAGAAAATGTATCTTTAAAAGGG | 3394 |
| hs132689106 | CCTGGGGTTATCAAGATACTAGG | 3395 |
| hs132692696 | TTTTGTTCTGAAATTTTCCTTGG | 3396 |
| hs132687060 | GTAATTGTTTCACATTTAAGAGG | 3397 |
| hs132690106 | TTGCAACCGTAATCTGATAAAGG | 3398 |
| hs132690872 | TTTCTCATGGTACTTAACTAAGG | 3399 |
| hs132691472 | GCTTAGGTATTTCCTCATAAGGG | 3400 |
| hs132690656 | TTCAGTTGTATTAGTGGCAGTGG | 3401 |
| hs132689313 | GGGGGCGTGGGGCCAAACAGAGG | 3402 |
| hs132690642 | GGAAATTATGTGACACCAGCTGG | 3403 |
| hs132691576 | ACTTAGATTTGTTAAATATGAGG | 3404 |
| hs132685236 | AGGTCCTTATGGGTGTTTGATGG | 3405 |
| hs132687884 | CATTTGCAAAACAATTTAAGAGG | 3406 |
| hs132683528 | GGTAGATGTATATAAGGTTTGGG | 3407 |
| hs132692832 | GCCACTGCAGTCCTGAAGGTTGG | 3408 |
| hs132687228 | CACATTTCCCAAGGCTTTGGAGG | 3409 |
| hs132689187 | TTTTTTCTAAAACAGTAGATTGG | 3410 |
| hs132689029 | ACTCCAATTGTTATAAAAGAAGG | 3411 |
| hs132693916 | TTTAATGATATTGGAAAAAGAGG | 3412 |
| hs132686216 | CTTCCAACAGAGATTTTAGTTGG | 3413 |
| hs132692838 | AGTTTAATATATTTGATACTAGG | 3414 |
| hs132692085 | AAAAGAAAATTATTGTATAAGGG | 3415 |
| hs132685309 | CACTTGTAATCCATCCTTAAGGG | 3416 |
| hs132687582 | TGATTTCTTCAAAGGCCTGCTGG | 3417 |
| hs132690165 | GAACCCCATTCCTCACTAATGGG | 3418 |
| hs132687741 | TTAATCTATGATGAAGGAAATGG | 3419 |
| hs132686286 | AAGCTGATTGATTCATTAAGAGG | 3420 |
| hs132683782 | GTTTGTTTATTTGTTTCTGCAGG | 3421 |
| hs132690303 | AGAAAATTATCTTTAAAGAAAGG | 3422 |
| hs132688399 | TCTGAGCTTTAAGCTATCATTGG | 3423 |
| hs132684524 | TTATATGCATATATACAGTTAGG | 3424 |
| hs132683364 | TAGACTTTATGGAGGAAGATTGG | 3425 |
| hs132690624 | AAGATTTCTGAATGTAAGAAAGG | 3426 |
| hs132690915 | CCATATGATCTAAAATCTATTGG | 3427 |
| hs132690337 | ATACAGTGATCTCTTTTAAAGGG | 3428 |
| hs132691775 | ATATGCTCATGAGCTTCCTTTGG | 3429 |
| hs132685675 | GGAAAGATTTGAAAATTCATTGG | 3430 |
| hs132691141 | ACCAGTGGTTGACAGAAGTATGG | 3431 |
| hs132693682 | AGATGGAAGCCAGCATCAATAGG | 3432 |
| hs132692825 | GTATCTTCACCCCAACCTTCAGG | 3433 |
| hs132692366 | AAGCTTTTGTGCAAATTAGTTGG | 3434 |
| hs132692051 | GCCTCCCCTTATTTTTATGTAGG | 3435 |
| hs132686474 | GCGTAATGAAAAACGATAGAAGG | 3436 |
| hs132690876 | TATTTTGCAACAGTATAATAGGG | 3437 |
| hs132688153 | GGACCAACACAGAAATATATAGG | 3438 |
| hs132691887 | AAGCAAATCATCAGACTTAAGGG | 3439 |
| hs132690070 | GAAGAGCTAGAGGATTCCTTTGG | 3440 |
| hs132689446 | ACTGTAGACGGGTAAATAAAAGG | 3441 |
| hs132685252 | TTAAGGCTTTTATAATCATTCGG | 3442 |
| hs132689280 | TGAGGAAAGCTGGGTTTTAGTGG | 3443 |
| hs132689864 | ACCACAAGTGAAAAGCAGTATGG | 3444 |
| hs132687609 | GTTTTTGTGGATTCACTGCTTGG | 3445 |
| hs132693558 | CCCTTGTCTGATTTCAGTAAAGG | 3446 |
| hs132686362 | CATGGTTGCCTATTGACTTAGGG | 3447 |
| hs132686961 | GTGCCTGCTTTATCTGTGCTTGG | 3448 |
| hs132691162 | GAAACTCTGTTCCTGTAAACAGG | 3449 |
| hs132691792 | CTTTGTATTTTGTCGATGATAGG | 3450 |
| hs132686398 | AATCTCAATTGTTTGCCAAATGG | 3451 |
| hs132687408 | CCAAGACTATTACAATAAAACGG | 3452 |
| hs132692742 | AATTTGCATGAATATACAAATGG | 3453 |
| hs132692642 | AGGAGGCTCTTTCACTTTTGCGG | 3454 |
| hs132684535 | CTAAACAATTTTCAGTGTAAAGG | 3455 |
| hs132684187 | CCTCAAATAATTAGAGCAACAGG | 3456 |
| hs132688357 | TGATATGTCAGGCCAGTAACAGG | 3457 |
| hs132693843 | ATAGTACTGCTCGTGTACTATGG | 3458 |
| hs132694190 | CACTATAAAAGAACAGTTAAGGG | 3459 |
| hs132684186 | CCTGTTGCTCTAATTATTTGAGG | 3460 |
| hs132694361 | CCATGACAGCATGTGAAGATAGG | 3461 |
| hs132683724 | CACTCCCTGTTCACCAAATACGG | 3462 |
| hs132694243 | GCTTTTTCCTTCTTAAAAGATGG | 3463 |
| hs132692086 | TGGCTCTCAAAAGATAGTTTGGG | 3464 |
| hs132687905 | CTCTGGCATGGAGTTCAAATAGG | 3465 |
| hs132688682 | AGAAAAGGAGATTCAAGATATGG | 3466 |
| hs132693350 | GTATCTGCTAAGACAAAATCAGG | 3467 |
| hs132688020 | GATTTCAAGGGGAAAAATTAGGG | 3468 |
| hs132690271 | TCAAGGCAGTTGGTTCGTATTGG | 3469 |
| hs132684666 | ATAAGGAAAGAGGAAATATAAGG | 3470 |
| hs132689671 | TCACTCCATTTTTCTCCAATGGG | 3471 |
| hs132684647 | CAAAGAGGCTAGAGATTGATTGG | 3472 |
| hs132685612 | TATGTTCCCATTTTAAAAGTAGG | 3473 |
| hs132687574 | ATATATCAGTAACTTTAAATGGG | 3474 |
| hs132690206 | ATTTGGCTCCAGCGTTTTAAGGG | 3475 |
| hs132692191 | AAGCAGATAGAATCGTGAAATGG | 3476 |
| hs132691147 | AGTTTGCTCAGAACTATATAAGG | 3477 |
| hs132693791 | TCACAAAGCTATGCATTAGAAGG | 3478 |
| hs132691582 | ACATTTATTTAGAAATGTAATGG | 3479 |
| hs132692584 | CATATTATCGTGATGTAGATAGG | 3480 |
| hs132688883 | CATTGGTCTCTGTATTTACAAGG | 3481 |
| hs132686104 | TACTTCCTCATTTTAGAAAAGGG | 3482 |
| hs132693566 | CTATTACTGTATTGATTAAGTGG | 3483 |
| hs132686968 | ACCTCACTATTCACGGCAACCGG | 3484 |
| hs132689430 | GAAAAAATCTATGGTATAAGAGG | 3485 |
| hs132693094 | ATAATTTTGTAAAATCGAATTGG | 3486 |
| hs132687119 | GTAAGTTTGTCTGCAGGGCTTGG | 3487 |
| hs132690483 | AGAGTATTCTTTATTTTAGCAGG | 3488 |
| hs132685579 | ACTTACACTATCTTACCAATAGG | 3489 |
| hs132688039 | ATCCTCTTAGAAATGACAATTGG | 3490 |
| hs132684015 | TTTTCATGACTTTTCCCATTGGG | 3491 |
| hs132691614 | CTAGCATGCTATACATCATATGG | 3492 |
| hs132690957 | GCCTGTTCCATGTTTGGTGTGGG | 3493 |
| hs132683645 | GTATATTTATCTATTTTTATGGG | 3494 |
| hs132690039 | GGAAGGGAAATTGGAACAACAGG | 3495 |
| hs132692677 | TCTCGTCTTCCTGTTGTCTTCGG | 3496 |
| hs132693013 | GTTTTATCATTGCTTTTTTGTGG | 3497 |
| hs132686557 | ATAAATGAGCTGGCCTGTATAGG | 3498 |
| hs132687436 | TTGGTCCTCTTGGATGTAAAAGG | 3499 |
| hs132686156 | GTTAAGTGAACGCTTTTCATTGG | 3500 |
| hs132684156 | TCTCAACAGCCTAGGATGATTGG | 3501 |
| hs132684682 | TGAGCAGTTAAATATTTAAAGGG | 3502 |
| hs132686357 | TCTCTCTTGTGATGTGATAAGGG | 3503 |
| hs132687599 | CTATAAATATAGAGTAGAAATGG | 3504 |
| hs132689787 | TTACAAAGCTGAGATATCTTAGG | 3505 |
| hs132694020 | ATCCTGTCTGGATGACCTAATGG | 3506 |
| hs132686497 | TCCACTTCATACTTTCAGTTAGG | 3507 |
| hs132693716 | GCACATACGGCATCAAATAATGG | 3508 |
| hs132690493 | CCTGTTGCATAAAAGTAATAAGG | 3509 |
| hs132689654 | TAAACCAGAATTTAAATTGAGGG | 3510 |
| hs132685310 | ACACTTGTAATCCATCCTTAAGG | 3511 |
| hs132690229 | CTTGGAACTATATTTAGTATAGG | 3512 |
| hs132690929 | TCCTAAGTCAGAAGTCTATTGGG | 3513 |
| hs132691504 | GCCTCTCGATATTTTACAACAGG | 3514 |
| hs132683587 | TCAATTGCTTTTTTATTGTAGGG | 3515 |
| hs132689447 | TTTTGCCCTCTGGTACTTTGTGG | 3516 |
| hs132692936 | AATGATATGGTCTTAATAGAAGG | 3517 |
| hs132685460 | TCTTAACCATCACATGCCTTTGG | 3518 |
| hs132687777 | TCTTTTGTCTGTTATTTCCCTGG | 3519 |
| hs132687458 | GCCTAAAGCACTGAGAATTAGGG | 3520 |
| hs132685375 | TCTTGTTTCATAAGAAAAACAGG | 3521 |
| hs132688917 | ATACGTTATTTAGCTCCCTTAGG | 3522 |
| hs132693543 | CTTTTTAACTAACAGACTAATGG | 3523 |
| hs132684144 | AAAGTTCTCTTTTTTTTCCATGG | 3524 |
| hs132690225 | ATAATATGCTGTAATATATGAGG | 3525 |
| hs132687558 | GCTATCCTGCAGATGCTAATGGG | 3526 |
| hs132687532 | ATTTTAGGTTGTTTTTATAAGGG | 3527 |
| hs132690257 | CTACAAACTATTTATTTGCTTGG | 3528 |
| hs132693158 | AATAGATTCCAAGTATGTATTGG | 3529 |
| hs132686893 | ATATCTCAGAATGATTTTAGAGG | 3530 |
| hs132690940 | AGCTTAGCGAACAGTGGCCTGGG | 3531 |
| hs132684979 | TTAAGGGTCAACGAAATCTAAGG | 3532 |
| hs132685930 | GTTTGATTTAGCACTCTTAAGGG | 3533 |
| hs132692924 | TCATTACAGCAGCTACAAAAAGG | 3534 |
| hs132686887 | AATATACTGACAGTATATATTGG | 3535 |
| hs132688674 | GCTGTCTAAATGCCTCAAAATGG | 3536 |
| hs132692055 | CAATACCTACATAAAAATAAGGG | 3537 |
| hs132685671 | GTGTAATTGCTAAATATTGTAGG | 3538 |
| hs132684521 | GTAGGGATTAGTTTTAAATAGGG | 3539 |
| hs132687941 | TATTTTTAAGTATTATTAGTAGG | 3540 |
| hs132692020 | ATTGAAATCCTAGGAAACTTTGG | 3541 |
| hs132690585 | TTTTCCACAGTGATCCATATTGG | 3542 |
| hs132684742 | TCAAACGTGCAAAATATGTTTGG | 3543 |
| hs132692919 | GTGTGTGTACATTCACAATTTGG | 3544 |
| hs132692402 | ACTATATATCCCATTTTAAGAGG | 3545 |
| hs132692891 | AATTCCAGTTTTATCATGATAGG | 3546 |
| hs132690905 | TTTCTCTTCTTAAAAGCTAAAGG | 3547 |
| hs132689691 | AATTAAGTGTCATCATCTAATGG | 3548 |
| hs132687723 | GATTTTCCTTTCATGGACTAAGG | 3549 |
| hs132686978 | GATTAGAAGGGAACGTAATCAGG | 3550 |
| hs132687117 | GCTTGGTCTGATTGATTTGAAGG | 3551 |
| hs132688129 | GACCCACAATTCAAACGTTTGGG | 3552 |
| hs132693552 | TTAACAGTATTAAGATCATAAGG | 3553 |
| hs132684759 | TGTTGCCTGTAGTAACAAATAGG | 3554 |
| hs132684723 | ATTCTAGGTATGTTCCAAAAAGG | 3555 |
| hs132683912 | AGGAATTCACAAACACAGATAGG | 3556 |
| hs132683879 | CTTAGAATAAACGTATCCTTTGG | 3557 |
| hs132691992 | AAAGTCCCCCTAAGTTTTAGAGG | 3558 |
| hs132688490 | GGGCAGCTTTCTGAACTGATTGG | 3559 |
| hs132691858 | AGAAATCTGTGAATAAATAAAGG | 3560 |
| hs132694036 | ATCTCAGGTTCCTCTCCCTTTGG | 3561 |
| hs132686135 | GTTCACTGAGCATAATGTATTGG | 3562 |
| hs132690770 | CAGAATGCCTTAAAAAGAAATGG | 3563 |
| hs132690010 | GGAAATTAGGGGTAAATAGATGG | 3564 |
| hs132683493 | GTGCCATTAATATTACAAAATGG | 3565 |
| hs132693968 | TTAATTTCCTAGGAGGAGTTGGG | 3566 |
| hs132687036 | TCAGATGCGGAAATTTCATTTGG | 3567 |
| hs132688342 | GTGCTCCAAAAATTTTTAGTAGG | 3568 |
| hs132687977 | TTCTCATTAACAAATGTAGATGG | 3569 |
| hs132686338 | GGGGAGGTGAAAAAGATTTACGG | 3570 |
| hs132692317 | TCATAAGCCCCAAATTTTGATGG | 3571 |
| hs132686565 | GCTGAAAGCCTTGGAACTTTCGG | 3572 |
| hs132691650 | TGCTCTTTTGGTGTGATCAAGGG | 3573 |
| hs132693117 | GAGAGAATCTGTTTACATATTGG | 3574 |
| hs132688444 | ACATCCATCAAAAAACTCTTTGG | 3575 |
| hs132691987 | TTACTGACCTCTAAAACTTAGGG | 3576 |
| hs132692177 | TCAAAGAAGGAAGAGTTCATTGG | 3577 |
| hs132693517 | TTTTTCCCATTATTGCTAGAAGG | 3578 |
| hs132685953 | GTATAGTTCTATGTGCTATAAGG | 3579 |
| hs132683971 | TTGACTCCCAGCTCAACTTTGGG | 3580 |
| hs132690461 | TTAAAAGTCAATTTTGAATCCGG | 3581 |
| hs132692665 | AACTTCATCCTAAGGTCAATAGG | 3582 |
| hs132687895 | CTATTTTGAAGCAAAGGTTTAGG | 3583 |
| hs132693395 | TTATGCGTAGGGTTCTGTTTAGG | 3584 |
| hs132691221 | GTACGTATTTAAAAACGATTAGG | 3585 |
| hs132685530 | TATGGTAAAATAAAGTATAAGGG | 3586 |
| hs132687682 | TCATTTTATTCCCTTATTTAGGG | 3587 |
| hs132686547 | TGAATTGAATTTTTGAAGATGGG | 3588 |
| hs132690873 | GCTAGTTTATGTGCTATGTTAGG | 3589 |
| hs132685075 | TGCTCTGTGAAGAAAGAAATTGG | 3590 |
| hs132686269 | ATTGACTATGAATTTATAGATGG | 3591 |
| hs132683659 | TATTTACTCAACTTACACTATGG | 3592 |
| hs132688624 | CTGTCAACTCTCTAGAAGATAGG | 3593 |
| hs132691209 | TTTTTACAGGAAAATACATTAGG | 3594 |
| hs132685604 | CTGTCAACAGATAATTTAGAAGG | 3595 |
| hs132691702 | GCTATGGCACCTTCAGTGATAGG | 3596 |
| hs132689847 | GCAATCCATTTCTATTATATGGG | 3597 |
| hs132685670 | AACCAGCCCCAGAAGTAAACTGG | 3598 |
| hs132692846 | AGCTAGTCTTAAAATCAAAAAGG | 3599 |
| hs132686560 | TGCTGGCTATACACTTTTAAGGG | 3600 |
| hs132686363 | TCATGGTTGCCTATTGACTTAGG | 3601 |
| hs132691784 | TCAAATAGATACCTTTTAAAGGG | 3602 |
| hs132693992 | TTAATATCATTGTATGCAACTGG | 3603 |
| hs132689764 | GCTCCTGCTTGAGCTATTGTTGG | 3604 |
| hs132687274 | GGAAGTCAATTTAAAATAAGAGG | 3605 |
| hs132693956 | TACTTTCCTTAATCTATAAAGGG | 3606 |
| hs132684231 | AGTAGTCATTCTAAAAAGATTGG | 3607 |
| hs132684710 | TGGCTGTTAATATCTCAAAAAGG | 3608 |
| hs132690340 | ACTACGGCAAATTTACAAACTGG | 3609 |
| hs132691527 | TTATAAACTGGCAAGAATATCGG | 3610 |
| hs132688152 | TGTTGGTCCTTCATAATACTTGG | 3611 |
| hs132683489 | GATATTTTGGAGCATTATAAAGG | 3612 |
| hs132684933 | ACATTCAAAGTGATGAGCTTTGG | 3613 |
| hs132687464 | ATTTGCCAGCATTAATAATAGGG | 3614 |
| hs132687150 | AGGGTAGCTGTATAATTAAAAGG | 3615 |
| hs132691579 | ATAGAGAATTATTATATCATTGG | 3616 |
| hs132685247 | GTTCAGAACCACGCACTTGTAGG | 3617 |
| hs132690294 | AGAGTTAAAAGAATTTATAATGG | 3618 |
| hs132686745 | TGATTTCTACCACAGCCTTTTGG | 3619 |
| hs132693361 | GCTGTAATGTTGACAATATCTGG | 3620 |
| hs132685960 | CTTTAAGGAAAGTTTTTAAAGGG | 3621 |
| hs132686695 | TATCTTGCTTTGCTATAAACAGG | 3622 |
| hs132689432 | GTAGGTTTAGAAAAAATCTATGG | 3623 |
| hs132693884 | TTCACTGTATGTGAACAAATAGG | 3624 |
| hs132689038 | TTAATTTATGAGCCTTTGTCTGG | 3625 |
| hs132689956 | TATAATATGCCAATGTCTATAGG | 3626 |
| hs132691889 | AAGTCTGATGATTTGCTTAAGGG | 3627 |
| hs132686323 | CGGCTGTTATTCAGTTATAATGG | 3628 |
| hs132686574 | TACCATACGCTAATCAACTATGG | 3629 |
| hs132690419 | TTAAAGCTGCTGAAGTTTGTTGG | 3630 |
| hs132690187 | TGTTTAGGCTGCCATTTTAAGGG | 3631 |
| hs132688062 | TTTTCCCTCCCAAATCATAAAGG | 3632 |
| hs132684226 | AGGTTTCACTGAACCATTAGAGG | 3633 |
| hs132694127 | ATATTCTTACCCTTGGAATCAGG | 3634 |
| hs132693885 | TGCTTCACTTACTCCTTAAGAGG | 3635 |
| hs132685751 | GTATATATACGTGGCTTATGAGG | 3636 |
| hs132693549 | GGTAACTGAGGTGTTCAATATGG | 3637 |
| hs132689149 | TTTTCCTGACCAGAAATAACAGG | 3638 |
| hs132691521 | ATGGCTAGTTTCTCATTAAAGGG | 3639 |
| hs132687719 | AAGCAAATTTTAGAAATAAGAGG | 3640 |
| hs132690401 | TATGTAACTGTTACTAAATACGG | 3641 |
| hs132684470 | GATTTTCAGCACCTGCTATTGGG | 3642 |
| hs132683600 | CCATAACTCCAATTTGCTAATGG | 3643 |
| hs132686384 | AGAACCGTGCCCAATACTTATGG | 3644 |
| hs132692068 | GTAGCTATAAGTGATTTAACAGG | 3645 |
| hs132690586 | ATATGGATCACTGTGGAAAAAGG | 3646 |
| hs132688828 | CTTTATCGTTTAGTTATTAAGGG | 3647 |
| hs132683925 | GGAGCATAGCTATTCCTAAATGG | 3648 |
| hs132691457 | GATTTGGGGTTGAATGGGGGGGG | 3649 |
| hs132689824 | CCAGGATTACTTGCCTTTGTAGG | 3650 |
| hs132684560 | ACAGTTCCCAAGGATTTGTTTGG | 3651 |
| hs132689295 | ATTCCAGAACAAATTCAATATGG | 3652 |
| hs132685847 | TTTCTGTTCCTTCCCACAATAGG | 3653 |
| hs132692345 | GACATGGGCAACAAATTAGATGG | 3654 |
| hs132689288 | TGTGCCTTATATTTCAAAATCGG | 3655 |
| hs132690542 | CACAATGCAGAAATCATTATAGG | 3656 |
| hs132684748 | CCATCACTTTCACAAAACTATGG | 3657 |
| hs132689353 | TATATGGGAAAGGTTACATTAGG | 3658 |
| hs132689679 | CCTGCAATTGGAAAGATACTTGG | 3659 |
| hs132685627 | GAGTAATTAAAAGTGCTTTAGGG | 3660 |
| hs132686598 | GACACAGTCTGAATAGTAATTGG | 3661 |
| hs132685119 | TTTATATCCACTATTGTGATTGG | 3662 |
| hs132693270 | GCCTTTGGAGAGGATGCATTCGG | 3663 |
| hs132693628 | CACAGTTTACTTTATGCAAATGG | 3664 |
| hs132691780 | CTATGTTACTGAAAAGTAACTGG | 3665 |
| hs132688950 | TTAGCTCTTCCAACAATAACAGG | 3666 |
| hs132690470 | CCAAAGTTATTTTTTCCCCTTGG | 3667 |
| hs132688410 | GCAATAGTCCGTAAACTTCCGGG | 3668 |
| hs132690685 | ATATGCTCCCTCATTCTTCTGGG | 3669 |
| hs132693294 | TTCTTCTCACTGAATATTAAGGG | 3670 |
| hs132684597 | AGTATTTAGAGCAAAAAAAAAGG | 3671 |
| hs132690563 | TCCTTGTGTTATTAAATAGATGG | 3672 |
| hs132688055 | ATTACTTTCATTAAAAGAATAGG | 3673 |
| hs132693762 | ATGGCACTATTGCCTCAAAATGG | 3674 |
| hs132685216 | TATGCTTTGTTTTTTCTCAATGG | 3675 |
| hs132689338 | GCAGTAGCTCAGAATGAGATAGG | 3676 |
| hs132689322 | GCACAGTAATTATTCATTATGGG | 3677 |
| hs132686984 | TCTGAGTCTGAAGCAGAAACTGG | 3678 |
| hs132693358 | GGCTTATGATGTTAATTTAGTGG | 3679 |
| hs132693346 | GTTCTTTCAGAACATAATAATGG | 3680 |
| hs132688143 | GAGAAGCTAAAGAGTAAATCAGG | 3681 |
| hs132683350 | GATAAATCTTAGCTACAATATGG | 3682 |
| hs132688664 | TTAGCACCTATGTCAGTAATTGG | 3683 |
| hs132688093 | AGTATTCTCAGAGATGAAAAAGG | 3684 |
| hs132688528 | CCTCTTTTCAGTTCAAAGAATGG | 3685 |
| hs132694023 | ACAGAGTCTATTTCTCCATTAGG | 3686 |
| hs132688429 | TTAGAGTCAGTGAGTTTATTAGG | 3687 |
| hs132688654 | ATATGGATTGTCTAAGTCATTGG | 3688 |
| hs132689959 | AAACAACCCAAAATTTTAATGGG | 3689 |
| hs132689682 | TTTCTAATAGAAGTATAAAAAGG | 3690 |
| hs132690138 | GAGAATGTAGATGGCTTAATGGG | 3691 |
| hs132683832 | ATACCACGCTTTGAAAATACTGG | 3692 |
| hs132687734 | ATAAAAGGAAACTTTTTAGATGG | 3693 |
| hs132691298 | TAGTTATGTAAATTATTTTAGGG | 3694 |
| hs132693656 | AGCCACACTGAAAGAATATATGG | 3695 |
| hs132690832 | ATATTTAGCTATAGTCGTTTAGG | 3696 |
| hs132692243 | GCATTTACCATGCAAGAAAAAGG | 3697 |
| hs132687510 | CCTTTGCCGATCAGCTTTAAGGG | 3698 |
| hs132690367 | TCCACAACTACTAAAAAAAAAGG | 3699 |
| hs132692334 | GGATCCTTGTTATAAACGTTTGG | 3700 |
| hs132691914 | TTGTTTTTAGAATTATTATCTGG | 3701 |
| hs132692633 | ATAGAAGCTGAACTCTAAACTGG | 3702 |
| hs132686317 | GGATGAACTTCATTATAATCTGG | 3703 |
| hs132683931 | AGATGACATGTCTAACAAAATGG | 3704 |
| hs132688867 | ATGCAGGGTGGTCAGGTAAAAGG | 3705 |
| hs132689225 | CTTGTGGTGCTGCTGAGATTTGG | 3706 |
| hs132691857 | ACTTTGCTGTTGTCCCCATCTGG | 3707 |
| hs132688914 | TTAGGGATATGATTACTCTTGGG | 3708 |
| hs132691271 | GCTCCCAAGCTACCTTTAACTGG | 3709 |
| hs132688537 | TTATTTGATAGACTAGTAAAAGG | 3710 |
| hs132683304 | TTTACTCCGAAAAACTATTTCGG | 3711 |
| hs132687931 | TTAATTATCACACACTATAAAGG | 3712 |
| hs132694409 | TCAGGAGTCTAGGTTTCTTCAGG | 3713 |
| hs132693062 | GCCAGGCATTGTCTGATTTAGGG | 3714 |
| hs132686069 | ATGTATTTCTTTGTTAAAGATGG | 3715 |
| hs132686077 | TGATATTAACATGAAAAAATTGG | 3716 |
| hs132685194 | CCCACATTGCTGGTACCGTTGGG | 3717 |
| hs132692800 | CTCTAGGCTAAACATATAAAAGG | 3718 |
| hs132689536 | CATAGGAGCCTTTGGCTAAAGGG | 3719 |
| hs132691344 | TCAATTCCTTGCATTTTTGCAGG | 3720 |
| hs132686914 | AGTGATTTGCATTATCCTATAGG | 3721 |
| hs132686759 | AAGAGAAGTGGAAGGTTTAGAGG | 3722 |
| hs132689861 | GATAGATTAAGGAAAGAAAAAGG | 3723 |
| hs132691186 | CTACCCGAAATATCATTCTTAGG | 3724 |
| hs132691516 | AATTTATTCATGTATAAAACTGG | 3725 |
| hs132693834 | CGGTGTGAAATAGACAAAAATGG | 3726 |
| hs132690610 | GCCATGGGCTTCATTGTCTATGG | 3727 |
| hs132684230 | TTGACTGCCCAAACCTCTAATGG | 3728 |
| hs132685294 | GCACAGAATCATTTTTATATAGG | 3729 |
| hs132692729 | GGTAGATGTATTTTTAAGCTAGG | 3730 |
| hs132685868 | GCCAACATGCAATAAAAGTTTGG | 3731 |
| hs132686992 | ACACAGGTGCGCAACTTTATAGG | 3732 |
| hs132693215 | CTTGGAATGCAATCTTTCTTGGG | 3733 |
| hs132690003 | TTTCTACTAAGGCAACATTTTGG | 3734 |
| hs132685633 | AGAGCGATAGAGGGAGATAAAGG | 3735 |
| hs132687406 | CCTATTTCTATAAACTTTAAGGG | 3736 |
| hs132692922 | TATGTTATTGAAATCATTTAGGG | 3737 |
| hs132691686 | TTCATCACCGTGATTACTAATGG | 3738 |
| hs132688571 | ACAATGTAGTGAAAATAAATTGG | 3739 |
| hs132684374 | CACACACCTTTTCAAATAAGAGG | 3740 |
| hs132691693 | TGTCCTTCAGATTTAGTTAGTGG | 3741 |
| hs132685452 | TTCTATTTAGTGCCATTTAGAGG | 3742 |
| hs132689822 | ACTGTCCTCAAGAGGAAATTAGG | 3743 |
| hs132691470 | CATTAAGCTAAGCAAATAAATGG | 3744 |
| hs132690107 | TCTCTTCCTTTATCAGATTACGG | 3745 |
| hs132693760 | CATTTGTGCTGTCAAATTAAGGG | 3746 |
| hs132691317 | CTAGATAAAATTCAATTGATAGG | 3747 |
| hs132685147 | ATTTTCTTTGGTTATATAAAGGG | 3748 |
| hs132687352 | AGTCCCAGTTATAAATTAATGGG | 3749 |
| hs132685495 | GTATACCAATTGTTCAGTTTTGG | 3750 |
| hs132685806 | TTTTATTTACTGCAGCTAAAAGG | 3751 |
| hs132683480 | ACATTTTCTGTGTCACATTAGGG | 3752 |
| hs132692490 | GCTCTCTTCAAATTTGGTATAGG | 3753 |
| hs132687270 | GCACTGTAAGGTACTTTATTGGG | 3754 |
| hs132684962 | TGTCCCCAGGAATTCTATAATGG | 3755 |
| hs132685027 | TTAAAACTCAAATTATTTGTAGG | 3756 |
| hs132690649 | CAGGGCAGAGAATTGCAAAATGG | 3757 |
| hs132685516 | CATCTTGTATGTAATTTTAAGGG | 3758 |
| hs132691524 | GGAAAATATTTCATTTTTAACGG | 3759 |
| hs132688451 | GCCACCAAAGAGTTTTTTGATGG | 3760 |
| hs132684236 | GTTTCTTTCACTGTGGTAACTGG | 3761 |
| hs132686490 | GCAGATTTAGCCAAATTAACAGG | 3762 |
| hs132687081 | TTTACAGAAACTCATATATAGGG | 3763 |
| hs132686120 | TTACTGTCTTAGAAAAGTTTAGG | 3764 |
| hs132687697 | AATACCAGATGCCACATAAAAGG | 3765 |
| hs132690636 | TCAGAGGGCAAGGGAAAAAAAGG | 3766 |
| hs132688887 | AGATGAACAATCCAGATATAGGG | 3767 |
| hs132687600 | TATAGAGTAGAAATGGAAATTGG | 3768 |
| hs132685044 | CTCAGTACTTAACATTTTAAGGG | 3769 |
| hs132692736 | AGGCATTACATGGGGATAAATGG | 3770 |
| hs132694224 | TCTCTGCTCACAACATTAACTGG | 3771 |
| hs132690462 | TGTTGTTGAGAGGATAAAAAAGG | 3772 |
| hs132687007 | ACAAATTTGAGTAAGTTATACGG | 3773 |
| hs132693787 | GCATTAAGTATCCAGCAAATTGG | 3774 |
| hs132688470 | GTTTACTACTTATTTGGTTCCGG | 3775 |
| hs132686360 | CCACTTTTCCCTAAGTCAATAGG | 3776 |
| hs132689680 | CCAAGTATCTTTCCAATTGCAGG | 3777 |
| hs132689576 | CCTTAACTTACTTAAACAATTGG | 3778 |
| hs132691377 | AGAGGTAGCTTTTCTGTCATTGG | 3779 |
| hs132693448 | CCAGGTTTTGTCAGGCACTATGG | 3780 |
| hs132689986 | TTACCATTTTTGCAGATATTGGG | 3781 |
| hs132685229 | TGTATTGTCAATCTTCCTTCTGG | 3782 |
| hs132691786 | GTAATGACTATCCCTTTAAAAGG | 3783 |
| hs132693639 | GATTTTATAAATGAGTAATATGG | 3784 |
| hs132686709 | TTATTAACCAACATAAAATATGG | 3785 |
| hs132690703 | CATACACTCTCAAAGAGATTTGG | 3786 |
| hs132692304 | TTAATTTGTAATTAGTCTATAGG | 3787 |
| hs132694041 | GTTCTATGACAAGTGTAAAAAGG | 3788 |
| hs132684210 | TGTACTTTAATGATTCTAATAGG | 3789 |
| hs132692444 | TTATGACTCCTGGACATTTTGGG | 3790 |
| hs132694247 | TATGAGAATGGGAGGATAATAGG | 3791 |
| hs132684150 | AGGTGGGCTGCCAGGTAAATTGG | 3792 |
| hs132688440 | TGGAAGTGTGAATAAAAGTTAGG | 3793 |
| hs132684670 | TCAAGTCTACCCATTCTTCTAGG | 3794 |
| hs132693447 | TATAATCTCGACGTACAATTTGG | 3795 |
| hs132692455 | AACACATTCTGCTATATCTATGG | 3796 |
| hs132691598 | AATGTGATATTTTATCAAATTGG | 3797 |
| hs132685440 | TTTAATGGCGTAAGTAAAACTGG | 3798 |
| hs132683633 | ATTCTGTCATAATTAGTCTATGG | 3799 |
| hs132688110 | CCATGGCAGGAAGATTTATTGGG | 3800 |
| hs132685317 | TTGTACTTAATAATAGTCTTAGG | 3801 |
| hs132689003 | ATAGAAACTCAGCTGAAATAAGG | 3802 |
| hs132685129 | TTTGTATCACTTAAAACATTAGG | 3803 |
| hs132693692 | GTATTAGATGTAACAAAAATTGG | 3804 |
| hs132691791 | AATCCCATTTCACTTTTGATAGG | 3805 |
| hs132689744 | GGATTGAGCTCATTTATAAAAGG | 3806 |
| hs132689425 | TTTCTGCATATATAGAAAATTGG | 3807 |
| hs132685563 | CCACTGTTCTCTATAAAATATGG | 3808 |
| hs132693462 | TTATATTGATGAACAGGTTTTGG | 3809 |
| hs132685756 | TTATATATATACATTTCTTTAGG | 3810 |
| hs132688228 | GTAGATGAATGTGATTTAAATGG | 3811 |
| hs132686157 | AGAAATCCAGTAATATTAATTGG | 3812 |
| hs132687499 | TAGTTGTCAACCTTCAAAATAGG | 3813 |
| hs132683510 | TTATTAAGAACAACTTTTGTAGG | 3814 |
| hs132687481 | GCTGAAGAATGGCAATAAAAAGG | 3815 |
| hs132693531 | TATATGGGAATCTAAATAAAAGG | 3816 |
| hs132689172 | GCTGTTATCGATTCGGTTTAGGG | 3817 |
| hs132692743 | TGTGTATTAAATGTTAAAATTGG | 3818 |
| hs132693567 | GTATCTATCTTAGGTATATATGG | 3819 |
| hs132685268 | TTAGTGAGATGAACTGTTAATGG | 3820 |
| hs132690091 | TCTTAAGCACCAACATAAAAAGG | 3821 |
| hs132684022 | ACAGTTACCCTTACTTTAGATGG | 3822 |
| hs132693438 | CCTTTCATCCCATTTGGTTATGG | 3823 |
| hs132689030 | ATTCCTTCTTTTATAACAATTGG | 3824 |
| hs132687580 | ACAATAGATGAACAAGAAAATGG | 3825 |
| hs132683728 | TCAAGCCAAAAATTATAAATAGG | 3826 |
| hs132685026 | TTATTAATGTATATGTATATAGG | 3827 |
| hs132693136 | AGACAGAGAGTAGCTCCTTTTGG | 3828 |
| hs132685209 | AGAACTTTAGGCAGAATTAAAGG | 3829 |
| hs132689915 | CTTAATTCAGAAATATATTTCGG | 3830 |
| hs132693391 | TTATCAATGCCATTAGTTACTGG | 3831 |
| hs132693636 | GATGCTGCCATATATGTAATTGG | 3832 |
| hs132684318 | ACAAAAGGATAGTTAGTAAAAGG | 3833 |
| hs132688040 | TTACTCATGTACAGAGTAAAAGG | 3834 |
| hs132691885 | GCTAAAGAACAATATATAAATGG | 3835 |
| hs132690590 | TTATAAGGCATATATTTCTTAGG | 3836 |
| hs132688561 | GATATTGCTGAGAAAAGTTTTGG | 3837 |
| hs132688554 | CCTTGAATTTATGCACTAAATGG | 3838 |
| hs132691906 | TTTGGCCTGTATATACATATTGG | 3839 |
| hs132691995 | GCCAAGTCTACAGTTCTTTAGGG | 3840 |
| hs132687892 | CTCTGTTGTGGTTTGCTTCAGGG | 3841 |
| hs132688241 | TGGCTCTTATAATAGGTTATTGG | 3842 |
| hs132685491 | CTAAATTTTCTGGCCAAATAGGG | 3843 |
| hs132685477 | CCAGTTTTCAAAAACATTGATGG | 3844 |
| hs132685890 | AGGTAAGTAAGACAGATTTTAGG | 3845 |
| hs132689835 | CTTCTAGCGCTTGTCATATAGGG | 3846 |
| hs132685993 | ATATGCTGTATTATATTTACAGG | 3847 |
| hs132683936 | GCATTGTGCATTTAAACTTTTGG | 3848 |
| hs132690779 | TGAGAGTCAGAGCCTGTTAATGG | 3849 |
| hs132683445 | ATAAAAATAACTTTATTAGAAGG | 3850 |
| hs132686884 | TGTCCAAGTCAGAAACTCTTTGG | 3851 |
| hs132690463 | TTTCACTCTACCAAATAAAAAGG | 3852 |
| hs132687095 | GCCAAGTGTCTTCCGCTAAAAGG | 3853 |
| hs132685168 | TCATATTAGCATTCACTTAGAGG | 3854 |
| hs132691015 | GGCTGTCCTTGCTAATTAATGGG | 3855 |
| hs132692286 | GATAATTCAGTGATTGTATACGG | 3856 |
| hs132686898 | TTAGACAAGCACAACTTATTAGG | 3857 |
| hs132688095 | ATACTCAGATGGACAAGTTTTGG | 3858 |
| hs132690677 | TATTTATCACACATGCAAAAAGG | 3859 |
| hs132690996 | CTATGGGCTTCCTTTCTAAAAGG | 3860 |
| hs132685710 | TTATACTGACGTTTATTATCAGG | 3861 |
| hs132689194 | GATTGTACCTTTAGACTTATGGG | 3862 |
| hs132690186 | ATAGAAATTATCCCTTAAAATGG | 3863 |
| hs132693901 | TCTTTCTCTTTCTTGTTCATTGG | 3864 |
| hs132689375 | AGATGTATACTTAAGATATATGG | 3865 |
| hs132685640 | TATGTATTTTTTTATTTAAAGGG | 3866 |
| hs132689733 | TGGACTCTGAAAACAAAAATAGG | 3867 |
| hs132694370 | GCATGAGCATGGACAGTATTTGG | 3868 |
| hs132687961 | CGTTTGGAATGACCATAAAATGG | 3869 |
| hs132686711 | ATATGTACTACGTTTTTTACTGG | 3870 |
| hs132689909 | AATCTCATACACTAGAAAAATGG | 3871 |
| hs132684722 | CCTCCTGTAACGTCAATTCTAGG | 3872 |
| hs132694092 | TAGCATGCTTAAAGCTTTAGAGG | 3873 |
| hs132686160 | ACTTAATGTACAGATTTTATAGG | 3874 |
| hs132692902 | TGTTATATAAAACCAAATAATGG | 3875 |
| hs132690895 | CTACTTTTCATGACTCTATCTGG | 3876 |
| hs132685277 | TTGAGAAACACAACTCTAAAAGG | 3877 |
| hs132690111 | CATGGAATCAGGACTATAAAAGG | 3878 |
| hs132690969 | GTAGGAATACTGGCCTTTACTGG | 3879 |
| hs132694206 | GGTAAATTCAGCAAGATTAATGG | 3880 |
| hs132693318 | CTTCTATGCTTCATTTTTGATGG | 3881 |
| hs132689673 | AAATTCCCATTGGAGAAAAATGG | 3882 |
| hs132686330 | TCTGGCCTGTGGGCCATAATTGG | 3883 |
| hs132691061 | TCCCCACTAGCCTCACCATTTGG | 3884 |
| hs132689408 | GTCCTTTTCTAAAAAAAATAAGG | 3885 |
| hs132692133 | CTAATTTTATGGTCAATAATTGG | 3886 |
| hs132690775 | ATTTTGAACCAAATTATAAATGG | 3887 |
| hs132693419 | TTTATACACAGGAATAAAAAAGG | 3888 |
| hs132686891 | GTTAAACACTTATTATTAAATGG | 3889 |
| hs132692643 | TGAATGGCTTTCCAGCCTTCTGG | 3890 |
| hs132689579 | CTTTCTGTCCAATTTATAAAAGG | 3891 |
| hs132686458 | TTTAAACTTACCCCTCAAAATGG | 3892 |
| hs132691351 | AATTTATTGGATTTAATATTGGG | 3893 |
| hs132685837 | TGTGCTTTACTATTTTCTTTAGG | 3894 |
| hs132687546 | AGTAGTGTTGTGTAAGTAAATGG | 3895 |
| hs132693049 | CTTTATCGAACCTTGTTAATTGG | 3896 |
| hs132684297 | TTGCATCTCCTTTTTCAGTATGG | 3897 |
| hs132691737 | CATCATTTACCAATATTTTAGGG | 3898 |
| hs132683388 | TTGTGACTCTGATTATCTTATGG | 3899 |
| hs132687480 | CCATTCTTCAGCATTTTTACTGG | 3900 |
| hs132691161 | TTAATATCTAACCTGTTTACAGG | 3901 |
| hs132686169 | TGAGTTATCGTTCTGTTCTTAGG | 3902 |
| hs132690550 | TCTGTGACAGTTATTAAAAATGG | 3903 |
| hs132692493 | CCAGTTACAGGCCCTTTTATGGG | 3904 |
| hs132688925 | GAGATGATCGATCTATGTTTTGG | 3905 |
| hs132687688 | TCAGCCCTCTACCCTAAATAAGG | 3906 |
| hs132689062 | GAGATCTCTCAGAAAAAAATTGG | 3907 |
| hs132693626 | GCAATAATTTAGATTGAAAAAGG | 3908 |
| hs132691735 | TTAAAGATTCCCTAAAATATTGG | 3909 |
| hs132685089 | TATTGCGGCAACTTTCTAAAAGG | 3910 |
| hs132687604 | TCACACAAGTAAAATTTTATAGG | 3911 |
| hs132684028 | CCAGACCCTCCTCTTCTAAAAGG | 3912 |
| hs132687360 | CATATAGGAGACGTAATATATGG | 3913 |
| hs132689960 | ATAAAACCCATTAAAATTTTGGG | 3914 |
| hs132692689 | ATAAAGATGTAAGTAGAATATGG | 3915 |
| hs132691688 | CCTTGGACTTGCTTCTAATATGG | 3916 |
| hs132683929 | TATAAAACAAACATATTAAAAGG | 3917 |
| hs132692592 | ATATCAATATAAAAGTTAATTGG | 3918 |
| hs132687890 | CCACAATCAGGACAGTAATTTGG | 3919 |
| hs132687177 | TCTTAAGAGCACATACTTATAGG | 3920 |
| hs132693991 | GCATGACCATGCAAACTTTCAGG | 3921 |
| hs132690137 | GTAGATGGCTTAATGGGTTTTGG | 3922 |
| hs132686326 | TTCAGTCTCTTGAGATTTACAGG | 3923 |
| hs132683595 | TTTATGCTCCATTAGCAAATTGG | 3924 |
| hs132689039 | CACACAAGTGAAAATTAAATTGG | 3925 |
| hs132689483 | CTTTGAGAGCAAACAAAAATTGG | 3926 |
| hs132689386 | ACATAGAGCTTCATACTTACTGG | 3927 |
| hs132692998 | GCAACTGCTACCACAGTTAAAGG | 3928 |
| hs132683292 | GTATTACATTCATTGATAAATGG | 3929 |
| hs132694001 | AAGTGTCACTTGAAATAAAAAGG | 3930 |
| hs132693245 | CTTTTTTTCCTTTCTGTAAAGGG | 3931 |
| hs132693741 | GCAAAAATCTGTATGCATTAAGG | 3932 |
| hs132689855 | GAAAACCAAGAGCTTATTAAAGG | 3933 |
| hs132683518 | TTTTCAGGCTCTTCATAAATAGG | 3934 |
| hs132690295 | TCTAATCTGCATTAAATAAAAGG | 3935 |
| hs132691486 | TACATACTGCAAATAATAATTGG | 3936 |
| hs132691267 | TCTTCCTTGAGTCCAGTTAAAGG | 3937 |
| hs132691189 | GGAAAAAGCTGGGAGTTAATTGG | 3938 |
| hs132686288 | TGTTCTACGTATTTCAAAAATGG | 3939 |
| hs132686710 | TGGTGTCAAGATATTAAAATTGG | 3940 |
| hs132683752 | TTATGCCACTGGATTAAAAAAGG | 3941 |
| hs132689940 | GATTTAGTATTGTAAAAAAATGG | 3942 |
| hs132684699 | TTTGAATGCAAAACACTTAGAGG | 3943 |
| hs132694215 | TCTCTAGTACTTAAGTAGTATGG | 3944 |
| hs132687841 | CTCCCTGCCATAGTTTTAAATGG | 3945 |
| hs132683334 | AATCCCTTAGTATAAATCTTTGG | 3946 |
| hs132687922 | TTTGGTGACACAAGTAAAAATGG | 3947 |
| hs132690875 | GTATTTTGCAACAGTATAATAGG | 3948 |
| hs132687535 | GTTTGGGCTTTTGTGTTAATTGG | 3949 |
| hs132688217 | CTAGGGCTAGGGCAATTAATTGG | 3950 |
| hs132689221 | GCTCGGCTATTTTTAGGTTTGGG | 3951 |
| hs132683945 | GTATTTATATTTGTCTTCTATGG | 3952 |
| hs132686003 | GCAGAGAACAACAATTTTAATGG | 3953 |
| hs132688446 | TGATGGATGTTCTTGTTTATTGG | 3954 |
| hs132683896 | TGTCATTTCTAGTACTTAATTGG | 3955 |
| hs132687957 | GTTACAGCAATGGGTCTTAATGG | 3956 |
| hs132685862 | TGGAATTCATGTATTATAAAAGG | 3957 |
| hs132687833 | ATTACCATTTCAACTCTAAATGG | 3958 |
| hs132691020 | GCAAAACGAGTGCCAATATTTGG | 3959 |
| hs132688657 | ATTGACTTCAATCTTTAATATGG | 3960 |
| hs132689333 | ACAAGGAGAACCAAATTATTTGG | 3961 |
| hs132686472 | GCACTAGAGGTTACTATAAATGG | 3962 |
| hs132684335 | TCACATTCCCTTGTAAAAAAAGG | 3963 |
| hs132689060 | AGTCAGTGCTCCTTATTTAAAGG | 3964 |
| hs132692384 | TCACAATCCCACTTTTTCTTTGG | 3965 |
| hs132688317 | TCATAAGCTAATTATTAAATTGG | 3966 |
| hs132687770 | TCATTTCAATCCACAAAAATAGG | 3967 |
| hs132687618 | ATATACACACAAGAAATTTTAGG | 3968 |
| hs132694140 | GATTGCTTCTTGCCTGAAATTGG | 3969 |
| hs132686423 | GCAGTACTCAACAAAGTAATTGG | 3970 |
| hs132691016 | AGGCTGTCCTTGCTAATTAATGG | 3971 |
| hs132685525 | GGTTATGTATATTATAAATTAGG | 3972 |
| hs132694135 | GCCGTCCTCTTACCAATTTCAGG | 3973 |
| hs132689712 | TGGCATACGGAGATCAAAATTGG | 3974 |
| hs132685552 | ATAACTTGTTTGGTGAAAAATGG | 3975 |
| hs132683911 | TTTCAATTCATGCCAATTATAGG | 3976 |
| hs132684732 | CTAACTCCAGTTTATCATTTAGG | 3977 |
| hs132693548 | TATCTGACTCTAAATAAATTTGG | 3978 |
| hs132694210 | GCAGAGACTTCAATTTTTTATGG | 3979 |
| hs132678323 | AATCAAAGATAACACCACAGGGG | 3980 |
| hs132681663 | AAGATGGTAGATGAATGCAATGG | 3981 |
| hs132678127 | GTATGAAGCAGAAACCACGAAGG | 3982 |
| hs132678114 | TATAGTATGTCCTACCACGGGGG | 3983 |
| hs132679020 | ATAGAGATCAGAAAGCCCAGTGG | 3984 |
| hs132681312 | AGGGTACTAGTGTAAGACAGGGG | 3985 |
| hs132678960 | AAGTGGAGAAAAGTTCAGAGGGG | 3986 |
| hs132678913 | TCAAAGATTCAACAACACTGTGG | 3987 |
| hs132678666 | GGGGCATCAGAAACACACAATGG | 3988 |
| hs132680468 | GAAGTTAAGAGCAAGCACTGAGG | 3989 |
| hs132681298 | GTAACATGTACCCAACAATGTGG | 3990 |
| hs132679252 | ACACTGAGAGTGGAACACAAAGG | 3991 |
| hs132677332 | ATATGCTTTGGAAAACACGGGGG | 3992 |
| hs132677361 | AGGCATGGGAAGTAACACGTAGG | 3993 |
| hs132677715 | TTCACTGTGTGTGATCCATGGGG | 3994 |
| hs132680854 | ATCTCCCTAAGCATACAGGGTGG | 3995 |
| hs132677251 | GGTGAATGCAGATGGTACAGAGG | 3996 |
| hs132678890 | GGTTAGCCCTCAAGGCAACGTGG | 3997 |
| hs132680274 | TGAATGGGAAACCATCAGAGAGG | 3998 |
| hs132683130 | TTTGTCATAGAGTATACACGAGG | 3999 |
| hs132678407 | ATGACAAAGTAAAATCACAGTGG | 4000 |
| hs132678466 | TGTACGGTCAAGAAACATGGTGG | 4001 |
| hs132682292 | TAGATATTACTCACTCAGGGAGG | 4002 |
| hs132680863 | ATTGGAGACTGTATTCACCACGG | 4003 |
| hs132678656 | AAGGGGTTGAGGGAAAGCCGAGG | 4004 |
| hs132680236 | GTAAAGGGGATAATACCCTGAGG | 4005 |
| hs132681045 | TATCATGAGAAAGACATGTGCGG | 4006 |
| hs132682883 | CACCCTTAAGTGAAGCACAGAGG | 4007 |
| hs132680658 | ACAGTGGTTTCCCTGCATGGAGG | 4008 |
| hs132678813 | GCAAACCCACTCCTACACGAAGG | 4009 |
| hs132678115 | ATATAGTATGTCCTACCACGGGG | 4010 |
| hs132680603 | GGAGAAGTGAAGAAACATGGAGG | 4011 |
| hs132681500 | ACTGAACAAAGCACTCCCGTAGG | 4012 |
| hs132682302 | TGAAATGTCTCCATTCAATGTGG | 4013 |
| hs132680837 | TGGTATTGCTAGTAGAACGGTGG | 4014 |
| hs132683067 | GATATGGGAGTTAAGATTCGGGG | 4015 |
| hs132681619 | TTTGACTGAATAGAAAGTGGTGG | 4016 |
| hs132682991 | CCTATGAGAAGCAGGCAGGGGGG | 4017 |
| hs132678425 | ACCACAACAGAGAAGGTTGGGGG | 4018 |
| hs132677450 | TCTTCTGTCAAAAGTCACAGAGG | 4019 |
| hs132679437 | ATGATGGTGAAACTGGCGGTGGG | 4020 |
| hs132678318 | TTAGAGATATTGTACCCCTGTGG | 4021 |
| hs132679242 | CATGTACATACAGTTCTACGAGG | 4022 |
| hs132677785 | TGCCTGTGTGTATGTGAACGAGG | 4023 |
| hs132678795 | AAGATAGCCTCGCAGCACAGTGG | 4024 |
| hs132679435 | ATGAATGATGGTGAAACTGGCGG | 4025 |
| hs132680592 | AAGGAAATATAAGCCCAACACGG | 4026 |
| hs132679395 | GAATTGCACACACACACACGCGG | 4027 |
| hs132681954 | GGACGCGTCAGTAAAACTGGTGG | 4028 |
| hs132681060 | TCTCTGTTATGAGTCCACAAAGG | 4029 |
| hs132679468 | GGGGCCACTTTTAAACTAGGGGG | 4030 |
| hs132682912 | AATTTATTGAACCCTCAAAGGGG | 4031 |
| hs132678361 | ATAAAACATTCAATCCCACATGG | 4032 |
| hs132679539 | CTGCAACATCAAAAACAGAGAGG | 4033 |
| hs132677945 | TCCCTTGTCCAAGAGCCCTGTGG | 4034 |
| hs132683271 | GAACTTGGTAAAGACCAAGAGGG | 4035 |
| hs132677949 | AATTCTAAATGATAACCACAGGG | 4036 |
| hs132680544 | AAAAGATGATGGAATCCCTGAGG | 4037 |
| hs132679924 | AGATACACTCGGAATTAGTGGGG | 4038 |
| hs132679119 | ATGTAACTAAGCATTTAGAGGGG | 4039 |
| hs132680979 | ATAAAGATACTAAGCCCTCGGGG | 4040 |
| hs132682746 | GTGGTGATAGTTCTAAAACAGGG | 4041 |
| hs132677368 | ATCACTATTAAAGAAGACGACGG | 4042 |
| hs132682471 | ATTAGGTATAATTATCACTGTGG | 4043 |
| hs132682690 | TCTTACATAATGTTCAAACAGGG | 4044 |
| hs132678754 | GTGATAGCCTTTGGTCAACGGGG | 4045 |
| hs132679680 | TGTATGCGTATGTCCAACAGAGG | 4046 |
| hs132679185 | AAGTGGGGTCAAGAGCCTGTGGG | 4047 |
| hs132679448 | ATACATAAAACGGAAAACTGAGG | 4048 |
| hs132677784 | CTGTGTGTATGTGAACGAGGAGG | 4049 |
| hs132678886 | TGCCTCCTATTATACCCTAGGGG | 4050 |
| hs132682364 | ATAGTGGTGTCAGATGAGAAGGG | 4051 |
| hs132682261 | ATAGCAGCCAGACAAAACAGAGG | 4052 |
| hs132680282 | TCTATCTCTTTAGGACCAGGGGG | 4053 |
| hs132680102 | TGTATTCTGTAATTGCTAGGGGG | 4054 |
| hs132682513 | CTCATGTACCTGGAAATGAGTGG | 4055 |
| hs132683156 | GTAGAAACAGAAGAAAAACTGGG | 4056 |
| hs132678090 | ATAGGCTGAAAGCTCCAACAGGG | 4057 |
| hs132680713 | TTTGAGGTACAACAGACCGAAGG | 4058 |
| hs132681473 | GCTAATGATAATCTAGACAGAGG | 4059 |
| hs132678865 | TGAGCAGAAACTGTATACAGAGG | 4060 |
| hs132680779 | TGTCTTGCTATGAAACCTAGAGG | 4061 |
| hs132677722 | AATGTGACAGATATCACATGAGG | 4062 |
| hs132680465 | TAGACGAATGGAGGTACACGAGG | 4063 |
| hs132679506 | AAAATGAACACAGACTGCAGAGG | 4064 |
| hs132682987 | AGTGAAGACTCAATAACAGGTGG | 4065 |
| hs132679519 | GAATAGGTACAGATTCAGAGTGG | 4066 |
| hs132679244 | GAGGAAATAAGAAATTCAAGCGG | 4067 |
| hs132678720 | AAGCCATTAAAACCCCTCAGAGG | 4068 |
| hs132682309 | AAGTCAGAAACACATGTGTGTGG | 4069 |
| hs132680795 | ACAGAAAGTTGGAACCAAAGGGG | 4070 |
| hs132680701 | GGAATGCATAAACACATGGGAGG | 4071 |
| hs132679823 | GTTTGGTAAATGCATCACCAAGG | 4072 |
| hs132677331 | AATATGCTTTGGAAAACACGGGG | 4073 |
| hs132679786 | GATGGGAACCAGTCTCTAGGTGG | 4074 |
| hs132678006 | TATCACCACAGGCTTCCCAGCGG | 4075 |
| hs132678647 | AGAGAAATGCTTCCTCAGTGAGG | 4076 |
| hs132682712 | CTACTGTTAAGACACAGGATGGG | 4077 |
| hs132681830 | CATGGTTTTCATGAACTGGGCGG | 4078 |
| hs132681688 | TAAACATCAGAAGACCTCAAGGG | 4079 |
| hs132679438 | ATTCATAAGATCAATGACTGTGG | 4080 |
| hs132682911 | GTTCAATAAATTCCTCAGTGGGG | 4081 |
| hs132677900 | GAGAGACCGCAAGATCAGGAGGG | 4082 |
| hs132682194 | TATGGGATCAAAGCATCCAGAGG | 4083 |
| hs132680153 | GTTTCCGTACTCCCCTAGTGGGG | 4084 |
| hs132678892 | TATAGATTAGAAAAAAATCGGGG | 4085 |
| hs132683207 | AAATATACCGAATTGCTCTGAGG | 4086 |
| hs132681337 | GCAAGAGGAAGAACACGTTGAGG | 4087 |
| hs132677073 | TAATCTCAGAAATGCCACAACGG | 4088 |
| hs132678526 | GTTTATTTTCTCTTTCTGCGAGG | 4089 |
| hs132680953 | GGGTGGGAAAGGTTTCAGAAAGG | 4090 |
| hs132680518 | GCCTTGGGAAATGAATAGGTGGG | 4091 |
| hs132680700 | AGAGGAATGCATAAACACATGGG | 4092 |
| hs132681557 | TGTGTGTGTACATATATGGGTGG | 4093 |
| hs132677134 | GCAGGGAACAATGATACCTGCGG | 4094 |
| hs132678766 | CTATGAAAACATGCACTGGGTGG | 4095 |
| hs132680614 | GGTAGGAATGCATTTCCCAGAGG | 4096 |
| hs132679415 | GGATAAACATTAGCTCTGTGTGG | 4097 |
| hs132678562 | GCACAGTTGAGACTACACCTTGG | 4098 |
| hs132677630 | AGATTAAGAGAAAAAAAACACGG | 4099 |
| hs132682986 | AAATGCTCGCTTACTCACAGAGG | 4100 |
| hs132682815 | AGCGTTCTCTATCTCCACAAAGG | 4101 |
| hs132677780 | CTCCTCGTTCACATACACACAGG | 4102 |
| hs132679359 | TCTAGATAGTATTTCCGTGGGGG | 4103 |
| hs132680512 | TTGTTACTGACTTATCTGAGAGG | 4104 |
| hs132677835 | TATCAAGGTCTCGATCGAGAGGG | 4105 |
| hs132681367 | TCATACAGAAAGGACTCAGGAGG | 4106 |
| hs132681460 | CCAAGCAAAGCACCAAACAGTGG | 4107 |
| hs132681282 | GCAAAATGTCTTAACACTAGGGG | 4108 |
| hs132677929 | CAACTAAGATAGACACAAAGGGG | 4109 |
| hs132682928 | TTTGCATGAAGCATTAGTGGTGG | 4110 |
| hs132677631 | GAACTGTTGGTGAAGCAGAGAGG | 4111 |
| hs132679526 | TCATAGAAAAGGATTCAGGAGGG | 4112 |
| hs132678672 | GTAATGTTATGAAAGAAAGGGGG | 4113 |
| hs132680792 | TTACACATAAATATGAACGATGG | 4114 |
| hs132677083 | GCTGGGAATTACCTCATGAGGGG | 4115 |
| hs132678650 | TGAGTTCTGTGGCCTCACTGAGG | 4116 |
| hs132681620 | AATCTACCTAAAATTCACAGAGG | 4117 |
| hs132682150 | AGTTGCTGTGGAAAAACCAGAGG | 4118 |
| hs132678725 | CAAATTTAATCACCTCTGAGGGG | 4119 |
| hs132677822 | ATATGCATCACTCAATACCATGG | 4120 |
| hs132679336 | AAAACAGTTAGATGGTACCAGGG | 4121 |
| hs132681708 | TCTCCTGGTAGCAAACAATGAGG | 4122 |
| hs132678678 | CAATAAGTAATACAGTATAGGGG | 4123 |
| hs132680057 | TGCACACCAGCTATACACACAGG | 4124 |
| hs132682717 | GTGACTTCATGATAAAAAGGGGG | 4125 |
| hs132677881 | CAGAATAAGAAAGCACTAGGGGG | 4126 |
| hs132679756 | TAGTGTTTGATTGAGGACGGAGG | 4127 |
| hs132682519 | TTATCTTTAGAAATGACTGGGGG | 4128 |
| hs132678418 | GAGTGTGTTCCTGAGAGGAGGGG | 4129 |
| hs132678353 | TCTAGATTTGGAGAGACAAGGGG | 4130 |
| hs132680247 | GTAAACAGGCAAAGTCACAAAGG | 4131 |
| hs132678449 | TGAAGTGCCTGGGTACTGGGTGG | 4132 |
| hs132679921 | ATATTAAGAACAGATACACTCGG | 4133 |
| hs132681939 | GTCCTTTAGAAATTTCTCTGAGG | 4134 |
| hs132679362 | GATACTCCTCATTACCCCCACGG | 4135 |
| hs132678796 | ATCACTACCACTGTGCTGCGAGG | 4136 |
| hs132681956 | AGGGTGAAGGAACCGTTTGGGGG | 4137 |
| hs132681846 | CACAGGGAACTGGCACCACGGGG | 4138 |
| hs132682275 | ATGTGGCAGTTTAATGACAGAGG | 4139 |
| hs132677440 | ACCAAGGATGACTTCCCAGTAGG | 4140 |
| hs132677857 | GTTATAGCAGTGTAGGCTGGAGG | 4141 |
| hs132677638 | TATGGAATAGCTGAGACTGAGGG | 4142 |
| hs132678587 | TTATGTGTAGATACACAGACTGG | 4143 |
| hs132677132 | ATGCCCGGGTACTTCAAGCAGGG | 4144 |
| hs132682909 | GGGTTCAATAAATTCCTCAGTGG | 4145 |
| hs132681479 | TGAGTGATAAACATCCTGCAGGG | 4146 |
| hs132677617 | TGAGGTCGAAGCTTACGGCAAGG | 4147 |
| hs132678724 | ATTTGCTGTGATAAACAGTGGGG | 4148 |
| hs132682199 | AAAACTTAAAAAGCACCTAGAGG | 4149 |
| hs132679326 | TGACTACAAAAGGTATCAGGAGG | 4150 |
| hs132677700 | TAAGTCACATCCAGAAATCGGGG | 4151 |
| hs132678719 | AGACAAAGAGTAAATTACTGAGG | 4152 |
| hs132679358 | ATCTAGATAGTATTTCCGTGGGG | 4153 |
| hs132679994 | CTACTGGGAAGGTATGCCTGTGG | 4154 |
| hs132679797 | AGAGAAGGAGGATAACTAGGAGG | 4155 |
| hs132680425 | AGAGTCCCGGTAGAAACTGGAGG | 4156 |
| hs132677195 | TGGAGGTAACCAAAATGGAGAGG | 4157 |
| hs132681311 | AAGGGTACTAGTGTAAGACAGGG | 4158 |
| hs132679143 | GCATTTTGTGCAATGCTGAGGGG | 4159 |
| hs132683053 | AGAAATGAACAAGTATCCAGAGG | 4160 |
| hs132678841 | AGGCAATACAAGAAACCTTGAGG | 4161 |
| hs132678531 | AAGGACTCAAACTTTTCGCGGGG | 4162 |
| hs132681233 | GTGAGAGTAATTGAATGCTGAGG | 4163 |
| hs132679809 | GGAGCTTTAAGAGCACTTTGGGG | 4164 |
| hs132681582 | GTAAAAAAAAATGTCAAACAAGG | 4165 |
| hs132678482 | ACAGTGCCAGGATTTGAAGGCGG | 4166 |
| hs132680237 | TAAAGGGGATAATACCCTGAGGG | 4167 |
| hs132677057 | TTGGAATATACCAGTCAGAGTGG | 4168 |
| hs132679761 | ATATATGCCAGGAGACACCTGGG | 4169 |
| hs132680008 | AATATAACTTGTTTACTGAGGGG | 4170 |
| hs132677275 | CCCTTATCAAGTGAACTGAGTGG | 4171 |
| hs132679504 | GGACTAAGCATCCCCCTGAGAGG | 4172 |
| hs132681546 | TCGAATTGCTTCAGCCCAAGGGG | 4173 |
| hs132679792 | CATGCGCATAGTCATACACATGG | 4174 |
| hs132678835 | GGACATAGTTTTCAACAGAGAGG | 4175 |
| hs132678801 | AGAGTCAGATGTCAACCGCAGGG | 4176 |
| hs132678610 | TCAAGAATTATAAGGCGGGGAGG | 4177 |
| hs132677907 | CAGGGGCTCATAAAGTAGTGAGG | 4178 |
| hs132680546 | AGTATTGTCGGATATCCTCAGGG | 4179 |
| hs132680268 | AATGAGACTTAATTACACAAAGG | 4180 |
| hs132682625 | AAGAAACCAGAAAAATCACTGGG | 4181 |
| hs132678983 | CAAAACATCTCATCAGAACACGG | 4182 |
| hs132680633 | AGACAACAGGATGTTAGCAGTGG | 4183 |
| hs132677648 | CATACTTAAGATCAAGTGGGAGG | 4184 |
| hs132678932 | AACTTCTAATAAGTAGACTGAGG | 4185 |
| hs132679363 | GGATACTCACTCCTCTGACGTGG | 4186 |
| hs132677457 | TCGCATCTTTCTGATACATGAGG | 4187 |
| hs132677959 | CTAACTTTCAGAAGATTACGTGG | 4188 |
| hs132678017 | ATTTGCCAGTAGGATGAGGAGGG | 4189 |
| hs132679505 | TGATAATGATGCTTGATGGGGGG | 4190 |
| hs132677647 | CCCCATACTTAAGATCAAGTGGG | 4191 |
| hs132679966 | TTACAGTCCAGTTACTTGAGGGG | 4192 |
| hs132681790 | AGGAAAGCCCTGTAATGACCTGG | 4193 |
| hs132681488 | AACACTACCCATGATTACACAGG | 4194 |
| hs132680072 | TATGGCCAATTAGTTGAACATGG | 4195 |
| hs132680982 | TAAAAGCACAAGAGGCCCCGAGG | 4196 |
| hs132680188 | GTTTAAACTACACTATAATGGGG | 4197 |
| hs132683180 | ACTAATCTGTGTATCCTACAGGG | 4198 |
| hs132678288 | ATTCCAAGTACAGACAAGTGTGG | 4199 |
| hs132677565 | TAAACACTAAGTCTTACGAAAGG | 4200 |
| hs132677056 | TAAACTTTATGTACCCACCCAGG | 4201 |
| hs132682463 | TTACTGGACTTAAAAGAACATGG | 4202 |
| hs132677973 | TAATCATGAAAAGAGTGGTGAGG | 4203 |
| hs132677783 | TGTGTGTATGTGAACGAGGAGGG | 4204 |
| hs132682233 | ACATCAACAGTAAAGCTAGACGG | 4205 |
| hs132677629 | GATTAAGAGAAAAAAAACACGGG | 4206 |
| hs132681976 | CTATATAATTTATATCATGGGGG | 4207 |
| hs132680290 | AGGCACACCACTAGAACACGGGG | 4208 |
| hs132682448 | TTTGGTACGCTTTCAAACTGGGG | 4209 |
| hs132677882 | ACAGAATAAGAAAGCACTAGGGG | 4210 |
| hs132682002 | ATTTGAAACAACAAGCAAGGAGG | 4211 |
| hs132677683 | GTATGAAAAGGACACGAGAGAGG | 4212 |
| hs132677289 | CAGATAGGTAGGTTGACAAGTGG | 4213 |
| hs132682316 | GATCCTTTCCATAGACTCTGAGG | 4214 |
| hs132678912 | ACATTATTATCACAGCTGCAAGG | 4215 |
| hs132679096 | ATTGGGATACTCCTATGCCAGGG | 4216 |
| hs132678068 | GATGCGGGAAAGGTGGACTGGGG | 4217 |
| hs132681427 | GCAAAAAGCACAGTGTCAAGGGG | 4218 |
| hs132681104 | TAAGGGCGTAGGGATAGGAAAGG | 4219 |
| hs132681667 | AATATGTAGACATATTGGCAGGG | 4220 |
| hs132679000 | TTTTGTTTTAGATATTAGAGAGG | 4221 |
| hs132681588 | GGTTACATCTAACCTCACAAAGG | 4222 |
| hs132680945 | AGAATATGTCAGAATTCCTGGGG | 4223 |
| hs132677660 | TAGCTTCCAAGAATGAGGGAAGG | 4224 |
| hs132680396 | ATCTGAGGATGTGCTTGCAGTGG | 4225 |
| hs132677338 | TTGGCCTCAAAGTAACAGAAGGG | 4226 |
| hs132679371 | ACGCATTTCTACAAAAACCGTGG | 4227 |
| hs132679313 | TCACATGAATAAAGTTCCTGAGG | 4228 |
| hs132679115 | TGTATGGTGTCTATATACGTGGG | 4229 |
| hs132678271 | ATAATGATTTCCAATCAGGTAGG | 4230 |
| hs132682438 | CACCTGGAGAGTTTACTGAAAGG | 4231 |
| hs132679057 | ATATTTAGCACATGACTAGGTGG | 4232 |
| hs132679472 | TTCAAGAAAAATGTTACCAGGGG | 4233 |
| hs132678713 | GCTTATGTTAAGGAAGCATGGGG | 4234 |
| hs132682842 | GCTAGCGAGCTAAACCAAAGAGG | 4235 |
| hs132678067 | GGTGGACTGGGGATACAATGTGG | 4236 |
| hs132677311 | CACAAAGAATTGCAAAACTGGGG | 4237 |
| hs132678962 | GAAAGTGGAGAAAAGTTCAGAGG | 4238 |
| hs132682357 | AACTTTATAGTACCCTACCCTGG | 4239 |
| hs132680214 | GATGGTTTTGAGTACTCAGGAGG | 4240 |
| hs132680349 | TTAAATGTAAATAATCCGTGGGG | 4241 |
| hs132681768 | ATGGCCTTTTGGCATCTGAGAGG | 4242 |
| hs132682496 | GAAATGGCATATTAAAACAGAGG | 4243 |
| hs132679822 | CCTTCATATCTGTAATCATGAGG | 4244 |
| hs132678659 | GAAACTGTAACAGTTGTAAGGGG | 4245 |
| hs132677052 | AAGACCACAATCTACCTGGGTGG | 4246 |
| hs132680871 | GCAGTGTATGAAGATTCAGAAGG | 4247 |
| hs132678981 | TTATTAATTAAAGACTTACGTGG | 4248 |
| hs132680430 | GGATTGATTTCTCAATCTCGGGG | 4249 |
| hs132678307 | GATTACGTGTGAGTGGTGCTAGG | 4250 |
| hs132680694 | GAGGATTCTCAGTTAAGGGGAGG | 4251 |
| hs132679825 | TTACACATAAGCAGAAGGAGAGG | 4252 |
| hs132682632 | ATTAGCCTGTAATTTTACAGCGG | 4253 |
| hs132680891 | GTAAAGTGGCAAATAGTTGGGGG | 4254 |
| hs132677718 | GTTTCAAGAACAGTATACTGTGG | 4255 |
| hs132680462 | TTGGATGAGTAGACGAATGGAGG | 4256 |
| hs132679396 | ACGCGGCACAATAAAACCCAAGG | 4257 |
| hs132683073 | AATGAGCTTCCTCAAACACAGGG | 4258 |
| hs132681537 | AGGTAACTGAAAACTTTCAGTGG | 4259 |
| hs132678364 | ATTCCAGGAAAGCTGCCATGTGG | 4260 |
| hs132681069 | TCAAGGACCTCAGAGTCGAGTGG | 4261 |
| hs132679501 | ACGAGATTCTTTCCTCTCAGGGG | 4262 |
| hs132681841 | TTGGGCCAGTGTAGGCCCCGTGG | 4263 |
| hs132681618 | GAATTTGACTGAATAGAAAGTGG | 4264 |
| hs132679907 | CTTTGCCAATGAAATGTGTGTGG | 4265 |
| hs132679238 | TTTCGTATGAAACCTCACATTGG | 4266 |
| hs132677685 | AGAGAGGACATGATATCCAAGGG | 4267 |
| hs132678056 | GTATGGGGAGAGTACAGGTGTGG | 4268 |
| hs132680802 | GGGAAACACTAACACAATGGTGG | 4269 |
| hs132680278 | ATTACAGACTAAATACCCCCTGG | 4270 |
| hs132680061 | TCAAAAAACGTAGAACGGAAGGG | 4271 |
| hs132679066 | CTGAACATGTGTAAAGCAAGGGG | 4272 |
| hs132677567 | TAGTTGCATTTACAATACAGTGG | 4273 |
| hs132678799 | GTGTACGTGTGTGTATGCATGGG | 4274 |
| hs132680558 | GAAGTATTAGCGAAGTGACAGGG | 4275 |
| hs132682789 | ACCTGGTGCAGAGGTCCCTGAGG | 4276 |
| hs132682133 | ATGTATGCATGTGTTATGGTAGG | 4277 |
| hs132679172 | AATGTGCTGGATGAATAAGAGGG | 4278 |
| hs132679169 | ATATAGCAAATATTCAACAATGG | 4279 |
| hs132678412 | ATAGTATCTAGGCTCAGAGACGG | 4280 |
| hs132681292 | ACACCTCCACACATATGGGAAGG | 4281 |
| hs132682477 | TTTTTTTCTACATAAAAACGTGG | 4282 |
| hs132678964 | CATTACGTTTCCATTTGCTGCGG | 4283 |
| hs132682085 | AAGTGATCACCAGAGACACATGG | 4284 |
| hs132677259 | GTGTATGTTGAAGATGAAAGGGG | 4285 |
| hs132680358 | AAAAACTGTCTAGAAACCACAGG | 4286 |
| hs132681754 | ATTGGAAATCAACTGCATGAGGG | 4287 |
| hs132681457 | TACATCCATGAAGCAGCAAGGGG | 4288 |
| hs132679810 | GAGCTTTAAGAGCACTTTGGGGG | 4289 |
| hs132677124 | TTTAGACTATTCCTACAACCAGG | 4290 |
| hs132679670 | CTACTGCCTATCTCTACCAAAGG | 4291 |
| hs132678265 | GGCCTGCTGTATTCCCTGGGTGG | 4292 |
| hs132677223 | AAAAAACCACATCAGACCGTGGG | 4293 |
| hs132683270 | TGAACTTGGTAAAGACCAAGAGG | 4294 |
| hs132682297 | AAAAATGATTAACAAAACACAGG | 4295 |
| hs132680486 | AGAGAACCAGAATGATTTTGGGG | 4296 |
| hs132678507 | ACATAAGGATCTACATGCAGTGG | 4297 |
| hs132682441 | GTAAACTCTCCAGGTGAGAGGGG | 4298 |
| hs132678845 | CTTAGCAAGAAGAATTGGAGTGG | 4299 |
| hs132677300 | AGTAGAAAGTAAAGAACACAGGG | 4300 |
| hs132678487 | GACAAAACCCCAGAGAAAGGGGG | 4301 |
| hs132680222 | AAATAGGTAGTGCCTTACAAAGG | 4302 |
| hs132678324 | AAATCAAAGATAACACCACAGGG | 4303 |
| hs132683017 | TCCTCACTATTTCTGAAACGAGG | 4304 |
| hs132681414 | AAGATTCAGCTACATCTGGTGGG | 4305 |
| hs132681788 | TGGATCACCAGGTCATTACAGGG | 4306 |
| hs132679824 | AAGGCTTACACATAAGCAGAAGG | 4307 |
| hs132678277 | TGAGTGACAGTTAAGTGGCAGGG | 4308 |
| hs132682588 | TGACAGGCATGATAGAAGCAGGG | 4309 |
| hs132682596 | GAACAGCCTGCATATTGCCACGG | 4310 |
| hs132682109 | TCTTTCAATTAAATATCGGGAGG | 4311 |
| hs132678064 | ACATTCATCTCAATTGAGCAAGG | 4312 |
| hs132679043 | GATAAACAGCATTTATACTGTGG | 4313 |
| hs132677880 | AAAGCACTAGGGGGCAACTGTGG | 4314 |
| hs132680740 | TACATGGCATCCAGAGAACAGGG | 4315 |
| hs132682283 | GACAGCCTCTACAAGTAGCAGGG | 4316 |
| hs132681370 | TCAGGAGGTCAATGTAAAGGAGG | 4317 |
| hs132681288 | AACTCTATCCAGGAGACATGGGG | 4318 |
| hs132682006 | AAGGAAAATGACAGAAATAGCGG | 4319 |
| hs132679621 | AATTTGTGTGTGATGTGTGGTGG | 4320 |
| hs132678589 | TCAATCCCCTCATATACAGAGGG | 4321 |
| hs132677763 | TGAGCAAAGCAGGAAAGGGTCGG | 4322 |
| hs132680549 | CATGTGCCTAGCACAAATAGAGG | 4323 |
| hs132677465 | TTGACTATCATCACATTCAGGGG | 4324 |
| hs132677370 | CCTTAGCAGATAAAATCAGTAGG | 4325 |
| hs132682647 | GTTGTGCTCATAGGGCACAATGG | 4326 |
| hs132681363 | CTTCTCTTGTAGATCACCAGTGG | 4327 |
| hs132677344 | GGTGATAACATTTAACAGGAGGG | 4328 |
| hs132681325 | GCTAATATATATAATTAAGGAGG | 4329 |
| hs132678664 | GTAATGTTGCCAGTACTGGAAGG | 4330 |
| hs132679548 | TTTACTATCCCAAAGTTGGGGGG | 4331 |
| hs132681248 | GTTCTTGCTATCATTAAGAGGGG | 4332 |
| hs132681697 | AAAGACAGGATATATAAGCAGGG | 4333 |
| hs132683262 | TGACTCTAGATGATTATAGGTGG | 4334 |
| hs132678065 | TGAATGTGTTCAAAAAAACCAGG | 4335 |
| hs132681141 | TAGGTAAATTAAATAATGGGAGG | 4336 |
| hs132679826 | TACACATAAGCAGAAGGAGAGGG | 4337 |
| hs132677924 | TAAAGTTTAAATGTACCTAGAGG | 4338 |
| hs132680324 | GAGTGTCTCCAGTGCCAGAGAGG | 4339 |
| hs132681195 | GTTGTCCCAGTAGAATCAGTAGG | 4340 |
| hs132677051 | CAAAAGACCACAATCTACCTGGG | 4341 |
| hs132679534 | AGATAAATATCGGAATCTGTGGG | 4342 |
| hs132680068 | ATTTGCAGTAGAGGAAACAAAGG | 4343 |
| hs132678250 | AGGAACTTAAAGTTCCCACTAGG | 4344 |
| hs132679436 | AATGATGGTGAAACTGGCGGTGG | 4345 |
| hs132678041 | TTCCCTCTAACAAACAGCCATGG | 4346 |
| hs132677943 | CATATACATTTCCCCAACCAGGG | 4347 |
| hs132678591 | ACCTGCCCTCTGTATATGAGGGG | 4348 |
| hs132679085 | TATAGTTCCAGCAGAAAGCGAGG | 4349 |
| hs132679547 | GTTTACTATCCCAAAGTTGGGGG | 4350 |
| hs132677421 | TTAGGCTTCAGATCTAGTAGAGG | 4351 |
| hs132677233 | AGTATGTTAGATTTTACCTGGGG | 4352 |
| hs132679604 | ATGGTATCACCTACTGTCAGAGG | 4353 |
| hs132680579 | CAAAAGGTAAGAGAATAGGATGG | 4354 |
| hs132681307 | GCTTTCATACAATACCCTGAAGG | 4355 |
| hs132682549 | GACACAATTATAAAACCAAGAGG | 4356 |
| hs132681210 | ATGTTGGAATCTACAGACCATGG | 4357 |
| hs132680331 | AGTATTACCGGTTGTCTAAGGGG | 4358 |
| hs132681064 | ATTCCAATACGATTGCTCCAAGG | 4359 |
| hs132677739 | AGATTTACCTGATGGTGAGGTGG | 4360 |
| hs132681511 | GGATGAAAGAGGAGACAAAGGGG | 4361 |
| hs132680870 | CAGTGTATGAAGATTCAGAAGGG | 4362 |
| hs132680337 | TATCCATTAACAGCTAAGGAAGG | 4363 |
| hs132681400 | GAAGCCAAGATGAGGTAAAGGGG | 4364 |
| hs132681586 | AAATTCTGTCTAATTTCACATGG | 4365 |
| hs132679690 | GTAGGACAGTCAAAGAGTGGAGG | 4366 |
| hs132677177 | CATATAGCATCCAAGACACAAGG | 4367 |
| hs132677067 | ATAGATGAAAAGCTCTCACAGGG | 4368 |
| hs132677574 | TTATAAGCTATAATTTCCAGTGG | 4369 |
| hs132680477 | GTAGTGAAGTTGCTTATCTGAGG | 4370 |
| hs132681923 | TCAATAAAACCACAAACACCAGG | 4371 |
| hs132677891 | AAAGGAATGGCAAGGCACATGGG | 4372 |
| hs132677168 | TTATGAAAAGAAAAAATCCAGGG | 4373 |
| hs132677655 | ACTTGATCTTAAGTATGGGGAGG | 4374 |
| hs132679443 | TGTTATGGCTAGGATAACTTGGG | 4375 |
| hs132681304 | TATTACTGCAGTACAAGCCAGGG | 4376 |
| hs132679240 | AATCTATAGTGAGATATGAAGGG | 4377 |
| hs132678785 | TTAATTCTCATGGTCATGCGGGG | 4378 |
| hs132679404 | GTGAACATCCACATGTACCTGGG | 4379 |
| hs132681158 | AGATTACCTTTCTGGTAGGGAGG | 4380 |
| hs132683195 | ATAAAAGTTTACAAAGACAGAGG | 4381 |
| hs132678980 | TTAATTAAAGACTTACGTGGAGG | 4382 |
| hs132677832 | GGCAGAGCCTCCATTCCAGAGGG | 4383 |
| hs132678130 | ATACCAGAGTAAGTACAGCTAGG | 4384 |
| hs132678967 | AGTATTCTGCCAAAATAAAGGGG | 4385 |
| hs132682157 | GCTGCCAACACCACAGTTGGGGG | 4386 |
| hs132681351 | ACATTTACTAGGCGTTAACAAGG | 4387 |
| hs132678109 | TGCTCCCATGCATACCCCCGTGG | 4388 |
| hs132680448 | CTCAGGCTTTGGAAACAGGGGGG | 4389 |
| hs132681403 | GTTACTTTGAAGCCAAGATGAGG | 4390 |
| hs132679019 | AAGAAAGTTTGTGAACCACTGGG | 4391 |
| hs132678177 | AATATTGTCAAAAATCCACCTGG | 4392 |
| hs132679583 | ACTTCTAGTATTCAGAAGAGAGG | 4393 |
| hs132682178 | TAAAGTATAGAAGATGTCCAAGG | 4394 |
| hs132681191 | TACAACCTACTGATTCTACTGGG | 4395 |
| hs132681845 | CCTGTGCTAAGAGGCAGCCAGGG | 4396 |
| hs132682060 | TGTCATGTACAGTGCTAGGTTGG | 4397 |
| hs132678777 | TTGCTAGGCTTGGCTTTCAGCGG | 4398 |
| hs132683043 | AGGATGATACTGGGACAAAGTGG | 4399 |
| hs132677245 | GTGGGAGTGCAAGTCAATAGGGG | 4400 |
| hs132681951 | GGTGGTAGAGACTAGGCTGAAGG | 4401 |
| hs132682938 | TGAAGAATTATATTGTTGTGGGG | 4402 |
| hs132677746 | AAGGGAACTAAAAGAATCGGAGG | 4403 |
| hs132678693 | CATCATCCTGCATCATGTGTGGG | 4404 |
| hs132677246 | GAGTGCAAGTCAATAGGGGAAGG | 4405 |
| hs132678117 | CTATATAGTATGTCCTACCACGG | 4406 |
| hs132680538 | AAGTAATAAGACATTTCCTAGGG | 4407 |
| hs132677103 | ACTAAAGAACATGTAACAGTGGG | 4408 |
| hs132680071 | CTAATTGGCCATAGTTACTGAGG | 4409 |
| hs132681945 | AAGGGAAGAAGACATTGTGTCGG | 4410 |
| hs132683021 | ATATTGATACAGGAAACTTACGG | 4411 |
| hs132677866 | AAACATATCTCCCTACAGAAGGG | 4412 |
| hs132682440 | TTTACTGAAAGGCATACCTAGGG | 4413 |
| hs132678852 | GAACATTTTCTAATTGAGGGTGG | 4414 |
| hs132678415 | AACAAGAGTGTGTTCCTGAGAGG | 4415 |
| hs132679493 | TCAAAGAAGACCATAGCACTAGG | 4416 |
| hs132679067 | GTAAAGCAAGGGGTCAGTTGCGG | 4417 |
| hs132677483 | GTTATATCATTTGACATCGGGGG | 4418 |
| hs132682709 | ATCACCTACTGTTAAGACACAGG | 4419 |
| hs132680951 | TTCAGAAAGGAGAAACCCATGGG | 4420 |
| hs132683070 | GAGTTAAGATTCGGGGACAGTGG | 4421 |
| hs132679568 | TGAGCATCTACACTGTGTCATGG | 4422 |
| hs132681832 | GAACTGGGCGGACTGCTACAGGG | 4423 |
| hs132680958 | AGTATATTTCTGAGGACTGGGGG | 4424 |
| hs132677922 | TTAATGTTTTCATTGAACGCAGG | 4425 |
| hs132678021 | TTCATAAAATGGGAACAAAGTGG | 4426 |
| hs132680433 | TCTCAATCTCGGGGTATGTGAGG | 4427 |
| hs132680526 | GCCTAATTCTACAGTAACTGGGG | 4428 |
| hs132681789 | CATCTTCTTTAGAACCAAGTCGG | 4429 |
| hs132680654 | TCCAGCATATCCTCCATGCAGGG | 4430 |
| hs132677936 | GCATCAGAATAATTGCTAGAGGG | 4431 |
| hs132679566 | TCTGGCCTTAAGTTCAAAAGGGG | 4432 |
| hs132678605 | GAAAATCAAGAATTATAAGGCGG | 4433 |
| hs132677539 | ATTGCATTGGAGGAACTGCATGG | 4434 |
| hs132677247 | TATTGACTTGCACTCCCACAGGG | 4435 |
| hs132679888 | ATGCTGGCATGAGGAGAGTGAGG | 4436 |
| hs132680224 | CTAATCAAATACAAGAAACAGGG | 4437 |
| hs132677181 | TGGATGCTATATGATCCTGATGG | 4438 |
| hs132680799 | ACACAATGGTGGCATGATAGGGG | 4439 |
| hs132678755 | GCTATCACATTTCCCACCATAGG | 4440 |
| hs132678643 | GCCTTCATTTCTGTGTCACGTGG | 4441 |
| hs132677354 | AGCCAAGGAGATCAATGCCAGGG | 4442 |
| hs132679350 | AACCTTCTAGTCAAACTCCAGGG | 4443 |
| hs132682168 | AGAACTGCTTTGTCCCCCAAAGG | 4444 |
| hs132678258 | GTCACCCTACTATTTCCTAGTGG | 4445 |
| hs132677345 | AGGTGATAACATTTAACAGGAGG | 4446 |
| hs132679083 | ATGTCCTGTAAATGTTCGAGTGG | 4447 |
| hs132680161 | AAATCCACCCACCCCACTAGGGG | 4448 |
| hs132678821 | TCAAGGTTGATAAGGGTCAAGGG | 4449 |
| hs132683071 | CAATCAGTCAGATTAAAGAGAGG | 4450 |
| hs132677229 | CCTGGGGTATTCATACTACAGGG | 4451 |
| hs132680657 | GTATACACCAATACTTATGAGGG | 4452 |
| hs132681053 | GCAAACAATAAGAAGCAGATGGG | 4453 |
| hs132681109 | AGATCTACATCAGCAGCCAAAGG | 4454 |
| hs132681114 | GACATAATGTCTGATGGCATAGG | 4455 |
| hs132677488 | CTGAGCACACTGGAGTCCTGAGG | 4456 |
| hs132682602 | AGGATCCCAGCCTTCTTCCGTGG | 4457 |
| hs132677824 | TCACTCAATACCATGGTAGGAGG | 4458 |
| hs132682562 | CTTGGCATTTCGGGAAACAGCGG | 4459 |
| hs132679258 | GCAAATTTCAGGTCTCTGAGGGG | 4460 |
| hs132679820 | CTCATGATTACAGATATGAAGGG | 4461 |
| hs132681806 | ATTCCACTAAACATAACGATGGG | 4462 |
| hs132683147 | TATTTTGTAAAGCTACGGAAGGG | 4463 |
| hs132677399 | TTATAGGGGATATTTAAAGGTGG | 4464 |
| hs132679866 | TTAACCTCATCCTCATAATGGGG | 4465 |
| hs132678495 | AGATGCCCCCCCTTTCTCTGGGG | 4466 |
| hs132677224 | AAAAAAACCACATCAGACCGTGG | 4467 |
| hs132680943 | AACCTGCTGCAGAACACCCTAGG | 4468 |
| hs132683164 | AGGCAGTAATCTGAGCTAGAGGG | 4469 |
| hs132679985 | GATTAACTTTTGGATATTGGGGG | 4470 |
| hs132677521 | TTTGCCTAAGCAGCTTTGGGTGG | 4471 |
| hs132681501 | GCACTCCCGTAGGTACTGAAAGG | 4472 |
| hs132678489 | CAAAACCCCAGAGAAAGGGGGGG | 4473 |
| hs132678749 | TGGCATATCTAGCCTATGGTGGG | 4474 |
| hs132677972 | ATCTCTAATCATGAAAAGAGTGG | 4475 |
| hs132679369 | TCTGCAACATGCTGAATCCACGG | 4476 |
| hs132678308 | AATAAATGATTACGTGTGAGTGG | 4477 |
| hs132678203 | GTATGACTAAGAGTGTGGATTGG | 4478 |
| hs132682018 | GGGCAAATTTCAATTTTATGCGG | 4479 |
| hs132680981 | AAAAGCACAAGAGGCCCCGAGGG | 4480 |
| hs132681566 | CTATAAAGCTATAAAATGAGTGG | 4481 |
| hs132678772 | TCACGTCCAGAGGCACACACTGG | 4482 |
| hs132680561 | AAGTTGGAAGAAATATTGGAAGG | 4483 |
| hs132681294 | CTTCAACCTTCCCATATGTGTGG | 4484 |
| hs132680369 | TCAGGAGTAGTAGTAACTCATGG | 4485 |
| hs132679906 | ACATTACAAACTCTGATGAGTGG | 4486 |
| hs132680829 | CATCCAGTGTAAAGGTGCAGAGG | 4487 |
| hs132681361 | ATCACCAGTGGGCATTCCTGAGG | 4488 |
| hs132678204 | AATCTGTATGACTAAGAGTGTGG | 4489 |
| hs132681771 | GATGCCAAAAGGCCATGACTGGG | 4490 |
| hs132678688 | CCTTGCTTACACGATCATTGTGG | 4491 |
| hs132680362 | CTCTTAATCCCATCATAAAGGGG | 4492 |
| hs132680880 | CAGAAGGACCGGAGACAGGTAGG | 4493 |
| hs132682538 | AATCCCCAACTACAATGCGTTGG | 4494 |
| hs132677227 | GAATAAAACTGAGCACCGAAAGG | 4495 |
| hs132680321 | TCTCCAGTGCCAGAGAGGGAGGG | 4496 |
| hs132682807 | TATGCACATATTATATAGTGAGG | 4497 |
| hs132682962 | GTCAAGATCTCAGTAACACTGGG | 4498 |
| hs132678756 | GGGTGTTAAGAAAACATGACAGG | 4499 |
| hs132677415 | GAAACGGTATGGTACAAGGTTGG | 4500 |
| hs132679217 | ACAGAAGTGTCAAAGTTGAGAGG | 4501 |
| hs132678464 | TGACCGTACAGAGATATGAAAGG | 4502 |
| hs132682716 | TGTGACTTCATGATAAAAAGGGG | 4503 |
| hs132680883 | AATTTTGTCCAATTCGCAGGTGG | 4504 |
| hs132683235 | TGGAGCCAAAACAATCCACTAGG | 4505 |
| hs132683143 | CAAATGACGCCACAACAACAAGG | 4506 |
| hs132680048 | TTTACCCATAACGTAAAGGAAGG | 4507 |
| hs132678542 | TAGATATTAAGGCCTGTGGGGGG | 4508 |
| hs132678717 | TAAATTACTGAGGAGGAAGACGG | 4509 |
| hs132680134 | AAGCTCAGTCTACTTTATCAGGG | 4510 |
| hs132678178 | TGGTATAGCAATTTTCCAGGTGG | 4511 |
| hs132680469 | TTAACTTCCATAATCAAAGGAGG | 4512 |
| hs132682609 | TTGTATGGTAGTTACAACATTGG | 4513 |
| hs132677820 | TCAGTGACTCTAGCTGAGAAGGG | 4514 |
| hs132678607 | AAATCAAGAATTATAAGGCGGGG | 4515 |
| hs132677071 | GAGACACACTATTAAATGAGTGG | 4516 |
| hs132680661 | ATAAGTATTGGTGTATACAGTGG | 4517 |
| hs132679489 | ATGAAACATTCAGTAGCAGTGGG | 4518 |
| hs132682873 | TTTCTTGTAATGCACATGGAGGG | 4519 |
| hs132678257 | TCACCCTACTATTTCCTAGTGGG | 4520 |
| hs132682747 | ACCACAGTCACTGAAGCCCTGGG | 4521 |
| hs132678370 | AGGATTTTGGTTATACCAAGTGG | 4522 |
| hs132682041 | AACAAATCCTAATGAACCCAGGG | 4523 |
| hs132680184 | GGTGAAGAAAGGAGAGTCGTGGG | 4524 |
| hs132680784 | GGCAAGCTTGCCTAAAAGTGAGG | 4525 |
| hs132681999 | TTGTGGAGAGAACTACGCTAGGG | 4526 |
| hs132678213 | AATCAATTTCAGGCACTGAACGG | 4527 |
| hs132679361 | GGAGTATCTCGCCACGTCAGAGG | 4528 |
| hs132677986 | GAGAGGCATAGGGAGAATAACGG | 4529 |
| hs132682551 | AAAAACCTAACTTTAGAACCCGG | 4530 |
| hs132678581 | GAACGTTTTATCATGATCTGGGG | 4531 |
| hs132678814 | TTACTGTGCTAATCCACACCTGG | 4532 |
| hs132679486 | GTTATAATCCACATGATACCAGG | 4533 |
| hs132678262 | CTATACAAACATACCACCCAGGG | 4534 |
| hs132679945 | TCACATACTGAGAACTGCATAGG | 4535 |
| hs132677376 | TTGAACACTTGCTAGCTGCAAGG | 4536 |
| hs132680288 | GCAGGCACACCACTAGAACACGG | 4537 |
| hs132677597 | GATAATGATATTTTAAACCAAGG | 4538 |
| hs132678083 | GTTTGACATGACCGTAATGGAGG | 4539 |
| hs132681928 | GTACACTATTTGTCAACCAAAGG | 4540 |
| hs132681665 | ACATGCCCTTTATGGCACAATGG | 4541 |
| hs132682801 | TTAGCTTACCTATAACAAAGTGG | 4542 |
| hs132682255 | ATTCACACATCAATCAGAAGTGG | 4543 |
| hs132681523 | TACACTATAAGATAAATGTAGGG | 4544 |
| hs132682888 | GAGAGATTGAAAGACTCTGTAGG | 4545 |
| hs132680857 | ACTCTGTTGGCACATTGCAGGGG | 4546 |
| hs132677430 | CCATACACAACTGCACCGTAGGG | 4547 |
| hs132680587 | AATTTTCTGTAAAGTAGCAGAGG | 4548 |
| hs132678316 | AATTTAATCACAGCAGTCAAGGG | 4549 |
| hs132678635 | CCTCTCGCGTCATAGTTTGGGGG | 4550 |
| hs132679806 | ACATAGTACAAAATTCATAGAGG | 4551 |
| hs132681490 | ACACAGGTTCATAATGCCACAGG | 4552 |
| hs132681094 | AGACAAATCTAGAAACAACTAGG | 4553 |
| hs132681348 | AATGTGTTACAGTAAGGAGGAGG | 4554 |
| hs132682916 | TCTGTAGTAGAGAATGTTGGAGG | 4555 |
| hs132682257 | ACTGGAATCCAGGAGCCAGATGG | 4556 |
| hs132680431 | TCAATCCTCCAGTTTCTACCGGG | 4557 |
| hs132677343 | TAAATGTTATCACCTGGAGGTGG | 4558 |
| hs132682092 | TAGAATTTGTAGGAGTAAGGAGG | 4559 |
| hs132681433 | ATGAGGCCTAAGATTTGGAGTGG | 4560 |
| hs132682759 | TTTTGAAGAGAAAATGTGGGTGG | 4561 |
| hs132678016 | GGATGAGGAGGGCATAGCAGAGG | 4562 |
| hs132677714 | CTGTGTGTGATCCATGGGGTAGG | 4563 |
| hs132681438 | ACAGCCATCAAGGTGTACTTGGG | 4564 |
| hs132682173 | GTATTTGCTTTTCATTGTGGGGG | 4565 |
| hs132682917 | AGGTCTGTAGTAGAGAATGTTGG | 4566 |
| hs132678049 | GGAGAAGAGGAAGGTCTGAAAGG | 4567 |
| hs132677966 | TCAAACCTGTAGCTCTATGGAGG | 4568 |
| hs132680836 | GACTGGTATTGCTAGTAGAACGG | 4569 |
| hs132678518 | GAAGCTGTTGAAGAGCCTTGTGG | 4570 |
| hs132682017 | TCAGCTAAGCATGCTAACCTCGG | 4571 |
| hs132679463 | GATCAGAGGCTTCAGTAGGGAGG | 4572 |
| hs132680780 | TTCATAGCAAGACAATAGATGGG | 4573 |
| hs132678358 | TCAAGCTGAATACAATTCAGTGG | 4574 |
| hs132680255 | TAATCACCTACCCCGACCAATGG | 4575 |
| hs132678132 | TCAAAGATGTAGACTGACACTGG | 4576 |
| hs132679243 | GTAGAACTGTATGTACATGAAGG | 4577 |
| hs132679147 | CATGTAGCTAAGGTTGCTAACGG | 4578 |
| hs132680814 | CCTTGGGATGGGAAACACAATGG | 4579 |
| hs132681308 | CTTTCATACAATACCCTGAAGGG | 4580 |
| hs132677409 | CTAATTACAATCTATCCCAATGG | 4581 |
| hs132677135 | GTTCCCTGCTTGAAGTACCCGGG | 4582 |
| hs132681689 | GTAAACATCAGAAGACCTCAAGG | 4583 |
| hs132680052 | ACACAGCTGATATAATTTGGTGG | 4584 |
| hs132677841 | ACATAGGCAATAGTAAATCAGGG | 4585 |
| hs132678460 | TTGAGCACTGTGTTTGCTGGAGG | 4586 |
| hs132681251 | AGTATAATATGTGCAAAACTGGG | 4587 |
| hs132680128 | TGTTACTAGAACTAAAATGAGGG | 4588 |
| hs132679580 | TTTGACTGGGCTATTCTGGGAGG | 4589 |
| hs132679714 | GCATGTCTAAGAACATCCCTAGG | 4590 |
| hs132683038 | CGAGCAGAGCTATTGTGCCATGG | 4591 |
| hs132680834 | TCTATTGGAGGAAATACAGATGG | 4592 |
| hs132679497 | AGGTAATTGGGAAATCCAGTTGG | 4593 |
| hs132682470 | GTGGTAAGCAGTCTCCAGAATGG | 4594 |
| hs132678869 | ATAAAGGGTTCAAAAATCTGTGG | 4595 |
| hs132680089 | TACAATTTCCTCAAAAACTGGGG | 4596 |
| hs132678686 | CCACAATGATCGTGTAAGCAAGG | 4597 |
| hs132681106 | GAGAACACTTTTTAGAGCCAGGG | 4598 |
| hs132677915 | AGCTCCAAATTTAAGAAACACGG | 4599 |
| hs132681850 | CCTGGCTGCCTCTTAGCACAGGG | 4600 |
| hs132680952 | TTTCAGAAAGGAGAAACCCATGG | 4601 |
| hs132681899 | AACACTTTGGTAACAACAGTAGG | 4602 |
| hs132681805 | CATTCCACTAAACATAACGATGG | 4603 |
| hs132681360 | GTGATCTACAAGAGAAGTTGGGG | 4604 |
| hs132682026 | CCTAGTCTTGCAAATGCTAGGGG | 4605 |
| hs132679256 | TTGGGTAACGAGATCACTAAGGG | 4606 |
| hs132677661 | TATATAGCTTCCAAGAATGAGGG | 4607 |
| hs132680607 | ACCCTTCACATGATAAAATGGGG | 4608 |
| hs132677303 | ATTACAAAAAGGACAAGCCATGG | 4609 |
| hs132681461 | ACCAAACAGTGGCATTGAAGAGG | 4610 |
| hs132677782 | CACAGGCATCTAGATATGGCAGG | 4611 |
| hs132683113 | TATATGTTGCGGCAATGAAGAGG | 4612 |
| hs132681341 | GTCTTGATGATGCCAATGCTAGG | 4613 |
| hs132682127 | TACCAAGTTTCCATTTACAAGGG | 4614 |
| hs132678319 | TAATTTGTCTTGGAATGATGCGG | 4615 |
| hs132682146 | CAACATAATAGGACAGCCCAGGG | 4616 |
| hs132680330 | GTATTACCGGTTGTCTAAGGGGG | 4617 |
| hs132679403 | GGATTGATCCCAGGTACATGTGG | 4618 |
| hs132678674 | GTGTAATGTTATGAAAGAAAGGG | 4619 |
| hs132678734 | ACAAACAGATGAGTTTCAGTGGG | 4620 |
| hs132679462 | GCAGATCAGAGGCTTCAGTAGGG | 4621 |
| hs132677985 | CTATGCCTCTCACAGCCAGAAGG | 4622 |
| hs132681182 | AGTTTGTAAGTATATTAGGAAGG | 4623 |
| hs132680423 | CATTAACTCAATCAGAGTCCCGG | 4624 |
| hs132683247 | TAAACCCAAGGCTTTAAGAGTGG | 4625 |
| hs132678486 | AGACAAAACCCCAGAGAAAGGGG | 4626 |
| hs132682288 | ATAAAAGAGTGCCCAGATGAGGG | 4627 |
| hs132681153 | ATATTTTGTACACATATGAAAGG | 4628 |
| hs132681875 | ACATAAAGAAGACTTAAACTAGG | 4629 |
| hs132679538 | TGCCATGGCATGAAATCCAAAGG | 4630 |
| hs132677705 | TCAATGGTAGTTGGTCATGATGG | 4631 |
| hs132677055 | GTACCCACCCAGGTAGATTGTGG | 4632 |
| hs132680245 | GCTCAGAGCTCACCTACTAAGGG | 4633 |
| hs132679512 | AGTCTGACTTTGCTCAGTGAAGG | 4634 |
| hs132681362 | TTCTCTTGTAGATCACCAGTGGG | 4635 |
| hs132677418 | TCTATGAGTACTCAGTTCCAGGG | 4636 |
| hs132681971 | GCTTACTAATGGATGTCACTAGG | 4637 |
| hs132682231 | GTCCTGCTAGATCAGGCATAGGG | 4638 |
| hs132678704 | CAGCTGATCTATCACGTCATGGG | 4639 |
| hs132680853 | GCTTAGGGAGATCACTCTGTTGG | 4640 |
| hs132677938 | TGACTACACTTCTGACACCCTGG | 4641 |
| hs132682000 | ATTGTGGAGAGAACTACGCTAGG | 4642 |
| hs132678488 | ACAAAACCCCAGAGAAAGGGGGG | 4643 |
| hs132682290 | GGGAGGATACACCCTCATCTGGG | 4644 |
| hs132681707 | CTCCTGGTAGCAAACAATGAGGG | 4645 |
| hs132681911 | AATTCCATTGGAATGACGGAAGG | 4646 |
| hs132683088 | ATCATGTTCTCAAGAAGACCAGG | 4647 |
| hs132678802 | TATGAAAGTGACAAAGCAAGTGG | 4648 |
| hs132678131 | GTTCCTAGCTGTACTTACTCTGG | 4649 |
| hs132679594 | AGATGTTTATATTCTGACGAAGG | 4650 |
| hs132679429 | AGTGTCAATAAAGGATTCAGAGG | 4651 |
| hs132677654 | CTTGATCTTAAGTATGGGGAGGG | 4652 |
| hs132680101 | CTGTATTCTGTAATTGCTAGGGG | 4653 |
| hs132678862 | TAGTAATGCTTATCTTGCCGAGG | 4654 |
| hs132677219 | ACATCAGACCGTGGGAACGGGGG | 4655 |
| hs132679759 | ATGTAATAGTCAATACGCCCAGG | 4656 |
| hs132680315 | GGAGGCAAGCATAGATCTTGGGG | 4657 |
| hs132681115 | CTGATGGCATAGGCTCCAGATGG | 4658 |
| hs132682003 | TTTGAAACAACAAGCAAGGAGGG | 4659 |
| hs132679114 | TTGTATGGTGTCTATATACGTGG | 4660 |
| hs132679661 | AATGTTATTGAGTTTATCTGTGG | 4661 |
| hs132679194 | TGTTAAACCTAGCAAAAGAGTGG | 4662 |
| hs132680766 | GCTTCAGCCTACCTTAGACTAGG | 4663 |
| hs132679420 | TTAAAATATTGAAATAGCGAGGG | 4664 |
| hs132681870 | GTGTATTTGCAGACTATCAGTGG | 4665 |
| hs132678314 | ATTAGCACATCTTAACCCATAGG | 4666 |
| hs132682673 | AATTGATCGCGATAGCAGTAGGG | 4667 |
| hs132679829 | GAGCTAAAAGGCTCCCCCAAAGG | 4668 |
| hs132677092 | TATGCTAGTACATCAGACATAGG | 4669 |
| hs132682968 | GCAAAGTACCTAAGTAACAAAGG | 4670 |
| hs132680461 | ACATTGGATGAGTAGACGAATGG | 4671 |
| hs132677878 | GGTTGGAGTACTTACAAGAACGG | 4672 |
| hs132679290 | ATGATGGCTGATATTTCCCATGG | 4673 |
| hs132683161 | AATGTGAGCCCATCAAAGGCAGG | 4674 |
| hs132678959 | AGTGGAGAAAAGTTCAGAGGGGG | 4675 |
| hs132680617 | AGAAGCATACAAAGTATACAAGG | 4676 |
| hs132681628 | GATTTGGCTTACAGGTTCAGGGG | 4677 |
| hs132681575 | TCCATAGTCAATGATGGCGATGG | 4678 |
| hs132677614 | AGCTTACGGCAAGGATGCAGGGG | 4679 |
| hs132679951 | TCTTCCGGAATACAATGTTGTGG | 4680 |
| hs132681208 | TAACATATACAATTTTACAAGGG | 4681 |
| hs132682576 | GAACAGAGATGTCATACAGATGG | 4682 |
| hs132683104 | AGCATGATAAGCATGATGTAGGG | 4683 |
| hs132679237 | ATAACTGCTTTGCCAATGTGAGG | 4684 |
| hs132681454 | TCTGTTCTCTGTTATAAAGGAGG | 4685 |
| hs132678961 | AAAGTGGAGAAAAGTTCAGAGGG | 4686 |
| hs132677467 | ATCATCACATTCAGGGGCAAGGG | 4687 |
| hs132678685 | ACAGAATGTGCCAAGCGTGTAGG | 4688 |
| hs132680506 | ATAAGGACTCTGAAATGCAAGGG | 4689 |
| hs132678273 | AATCAGGTAGGCAGGAAATGAGG | 4690 |
| hs132682252 | CATCAATCAGAAGTGGTGTAGGG | 4691 |
| hs132679614 | ATCACATGTCCAATATTACTGGG | 4692 |
| hs132681095 | CTCAAGAAGCAAACAAACCAAGG | 4693 |
| hs132679770 | TCTGAACTTCAAATACACTCTGG | 4694 |
| hs132680866 | CATCACACAATATATGGCCGTGG | 4695 |
| hs132678205 | AAAGAACCAAAAGGAACCCAAGG | 4696 |
| hs132678563 | CAGTTGAGACTACACCTTGGAGG | 4697 |
| hs132679218 | CAGAAGTGTCAAAGTTGAGAGGG | 4698 |
| hs132678859 | TAAGAGAAAATACAGTCTAGAGG | 4699 |
| hs132681837 | ACTACACAGAGAAAAGTTGTGGG | 4700 |
| hs132682437 | GTAGTAAGTACTGCTTTACATGG | 4701 |
| hs132678123 | CTGGCACTGTAGTTAAGAGATGG | 4702 |
| hs132677337 | GTTGGCCTCAAAGTAACAGAAGG | 4703 |
| hs132682415 | ACACTGCACTCAGTTGATAACGG | 4704 |
| hs132681964 | AAGGATACTTGGGAGCAGGTTGG | 4705 |
| hs132681354 | CACACCTCAGGAATGCCCACTGG | 4706 |
| hs132681267 | TAATGTATCCAAGACAACATTGG | 4707 |
| hs132682422 | ACTCCACTCCCTCTCTTGAAGGG | 4708 |
| hs132678722 | AAATTTGCTGTGATAAACAGTGG | 4709 |
| hs132678541 | GTAGATATTAAGGCCTGTGGGGG | 4710 |
| hs132678984 | TGTGGGTGGCAGTAAGGGAAGGG | 4711 |
| hs132680970 | AAATACACTTACTATCCTAAGGG | 4712 |
| hs132682976 | GAGTTCACATGCCAGTAAAGTGG | 4713 |
| hs132679634 | GTTAGAGAGAAATTATAGAGCGG | 4714 |
| hs132678004 | CCTGTGGTGATAAACAGCATTGG | 4715 |
| hs132683076 | GGAAAGGGATGAAGTTGTGAAGG | 4716 |
| hs132678253 | GTTCCCACTAGGAAATAGTAGGG | 4717 |
| hs132681682 | TTTAGAAATGGGATATCCTGGGG | 4718 |
| hs132680751 | ACCTGGACATTATGAAAGAGAGG | 4719 |
| hs132681200 | TTATTTCCTGGAACAGAACACGG | 4720 |
| hs132681813 | AAATAAGGAACTTTGTCCCAAGG | 4721 |
| hs132682398 | CATTTTGGAGATTCCATGTGTGG | 4722 |
| hs132681083 | TTTTATTTAATACTTTTGGGTGG | 4723 |
| hs132679652 | TACTGGGAGTCTCCGATAGTGGG | 4724 |
| hs132682007 | CAAGTAATATGGACAGCACAAGG | 4725 |
| hs132681642 | TAAACCTTGATTAAAAGCCAAGG | 4726 |
| hs132677508 | TTTTCCTTATGTGTCAGACGAGG | 4727 |
| hs132682568 | AACAACAAATATAAAAAAGGTGG | 4728 |
| hs132679492 | GCTACTGAATGTTTCATACCTGG | 4729 |
| hs132680283 | ATCTATCTCTTTAGGACCAGGGG | 4730 |
| hs132679478 | TTAACTATAATAGAGCCCTTCGG | 4731 |
| hs132677520 | CTTTGGGTGGTTAATCAAGTCGG | 4732 |
| hs132677836 | GTATCAAGGTCTCGATCGAGAGG | 4733 |
| hs132680502 | GGGGAAATAATACTTATCAAAGG | 4734 |
| hs132680785 | CTTGCCAGTTTTTTTCAGTGGGG | 4735 |
| hs132680685 | ATAACATTTCAAAATGCCCTGGG | 4736 |
| hs132677619 | GGTGGGTCTATCCAAGGCTGAGG | 4737 |
| hs132679122 | GGGAAGACTGGTATGTGTAAGGG | 4738 |
| hs132677997 | TTTATTAATGCCAGTGACTGCGG | 4739 |
| hs132679516 | TCTCTGTGTCTCTAACCTGAGGG | 4740 |
| hs132681725 | CATGTTTACAGGCATGGGAGAGG | 4741 |
| hs132677118 | TGTCTTTTGCCTGGAAACCAGGG | 4742 |
| hs132679136 | GAATTACAGCAGAGGAGGCGAGG | 4743 |
| hs132677510 | TTCCTTATGTGTCAGACGAGGGG | 4744 |
| hs132682010 | GGTACTAGAGTTAAAAGAAGAGG | 4745 |
| hs132677385 | GATTTCCATTAACGATGGTGTGG | 4746 |
| hs132681983 | AATTCCTCCTCCAAAAATCAGGG | 4747 |
| hs132677786 | ATCTAGATATGGCAGGCAGTAGG | 4748 |
| hs132677610 | TACAGTCTAAAATCAAGAGAAGG | 4749 |
| hs132679490 | GTTTCATACCTGGTATCATGTGG | 4750 |
| hs132679456 | GTTTCTTGCACTAAAAGATGAGG | 4751 |
| hs132678463 | TGGAGGATGAAGAATGACAAGGG | 4752 |
| hs132682434 | TGATTTGATCACAGTTCAGGTGG | 4753 |
| hs132679476 | GAAACAGTTTTCCTGCCGAAGGG | 4754 |
| hs132681798 | TAGGCAAGCTGCTACAAGGAAGG | 4755 |
| hs132677162 | TTTTGCTCCTGGCCAAAGGAGGG | 4756 |
| hs132682638 | AAAAAATGTTCAATCAAAGGTGG | 4757 |
| hs132682878 | ATATAATTCTAGGAATCCATAGG | 4758 |
| hs132682753 | TGAATAATAATGGGAAATGGAGG | 4759 |
| hs132682485 | TCTTGCTTCACTTTAATGTGAGG | 4760 |
| hs132682676 | ATGTACTTACATGATTATGTAGG | 4761 |
| hs132678736 | TCCCCTACTTTTCCTACTGTAGG | 4762 |
| hs132681458 | TTACATCCATGAAGCAGCAAGGG | 4763 |
| hs132680693 | AATGAGGATTCTCAGTTAAGGGG | 4764 |
| hs132678112 | CCTACCACGGGGGTATGCATGGG | 4765 |
| hs132678883 | CCTAGGGTATAATAGGAGGCAGG | 4766 |
| hs132678718 | CAAAGAGTAAATTACTGAGGAGG | 4767 |
| hs132678920 | TCTCCAGTGATACTTTAACATGG | 4768 |
| hs132681762 | CTCAGGACAAGTAGATAGGGAGG | 4769 |
| hs132678501 | TGCAGGATCTACCGGAAAGTAGG | 4770 |
| hs132677839 | AGTTCAAGAGTCGATGAAGAGGG | 4771 |
| hs132679623 | CATAACATGTTATAAAACATAGG | 4772 |
| hs132680355 | ACCTCCTATGTCCACCCCCACGG | 4773 |
| hs132681446 | TACATAGATCTTGTATCCCAGGG | 4774 |
| hs132679991 | GATACAAATAATGTAGCGAAGGG | 4775 |
| hs132677445 | TAGACAGACCCTTACAGGCATGG | 4776 |
| hs132677086 | AGATAGGTGATGAAAAAGCTGGG | 4777 |
| hs132681922 | AGATGTAGATGGGATCTCACTGG | 4778 |
| hs132681855 | GCAAGGCAGCTATATAGCAAAGG | 4779 |
| hs132678281 | CTATTACCATGAAATACACTAGG | 4780 |
| hs132679273 | CAAATTCTATGAGGTAGAGAGGG | 4781 |
| hs132678884 | CCCTAGGGGTGTAATCAAGAGGG | 4782 |
| hs132680151 | TAGTTTCCGTACTCCCCTAGTGG | 4783 |
| hs132683039 | TTTAGAATTCACTTACACAATGG | 4784 |
| hs132677741 | AGAGAAGGAGATTTACCTGATGG | 4785 |
| hs132677327 | ATACATTAGATTTATGCAGAGGG | 4786 |
| hs132677128 | GACAAGACCTGTAAATGCCCGGG | 4787 |
| hs132679794 | ACCCCCAGTAAGAGAGAAGGAGG | 4788 |
| hs132681493 | TTATGAACCTGTGTAATCATGGG | 4789 |
| hs132680732 | TCTCACTTCTTATTAACAGAGGG | 4790 |
| hs132683168 | GAACTGAGTGGGCTCAGTGTGGG | 4791 |
| hs132682121 | ATAGATACAAGTATATTGAAAGG | 4792 |
| hs132680505 | GAGTCCTTATCAGTATTCAAAGG | 4793 |
| hs132681731 | TTAGAATAATCAGGAACCAGTGG | 4794 |
| hs132680728 | TTCTTTCCCAAGGCCAAGAGGGG | 4795 |
| hs132682775 | AGCAAGAAGGTAACCAAAAGGGG | 4796 |
| hs132681321 | CAGGCAGAAGGCATTTCCAGAGG | 4797 |
| hs132679959 | GATCTTGTTACCTGAATCAGGGG | 4798 |
| hs132677823 | GCATCACTCAATACCATGGTAGG | 4799 |
| hs132677306 | AATTACAAATCCCTAGACATTGG | 4800 |
| hs132679457 | TTTCTTGCACTAAAAGATGAGGG | 4801 |
| hs132677577 | GGTGACAGTTTTAGTTCACAGGG | 4802 |
| hs132680910 | ATTCCATCAGAAAAAATGGTGGG | 4803 |
| hs132682268 | ATGTATACTTAGGTGTCTGTAGG | 4804 |
| hs132683237 | TACAAAATCAGACCCATAGAGGG | 4805 |
| hs132679065 | TCTGAACATGTGTAAAGCAAGGG | 4806 |
| hs132682321 | ACTTATTATTTTGTCATACACGG | 4807 |
| hs132679216 | TTTACTATATATATAAGTTGGGG | 4808 |
| hs132682841 | CTAGCGAGCTAAACCAAAGAGGG | 4809 |
| hs132677142 | GTGGCTGGATTCACAAAGCTGGG | 4810 |
| hs132679502 | CGAGATTCTTTCCTCTCAGGGGG | 4811 |
| hs132678771 | TCCAGAGGCACACACTGGAATGG | 4812 |
| hs132680762 | CCATATGCCTAGTCTAAGGTAGG | 4813 |
| hs132682012 | TTCAATCTTTTCCAAAGCCGAGG | 4814 |
| hs132677545 | ATACACACACTTTTTTTTGGGGG | 4815 |
| hs132678142 | TAAAAAATATCTTCTATCAGAGG | 4816 |
| hs132678935 | ATGTTTTTAGAAAACATCACAGG | 4817 |
| hs132677911 | GACAATGCTAGTTTTAGTAGGGG | 4818 |
| hs132682320 | TTCCATTGAAGACATTAAGACGG | 4819 |
| hs132680422 | TACATAGTCACTTTATAAGAGGG | 4820 |
| hs132683050 | TACCTTCTTGGCATCAAACAGGG | 4821 |
| hs132681465 | GGTTGACTGACAGTGGTCTAGGG | 4822 |
| hs132680897 | CTGAGAAAATCATCAGTCCAGGG | 4823 |
| hs132683248 | AAATATGGCCCTTAAACCCAAGG | 4824 |
| hs132680689 | AACAATGAAACATTTTACCCAGG | 4825 |
| hs132680942 | TGTTCTGCAGCAGGTTAAGTGGG | 4826 |
| hs132678990 | CTTTTATTTACTCTTGTGGGTGG | 4827 |
| hs132681379 | GAAAAGGGAGAGTGAGAACGAGG | 4828 |
| hs132679601 | TTTACTTTACCTCTGACAGTAGG | 4829 |
| hs132679771 | CATTTGTCTCAGAGCAATGATGG | 4830 |
| hs132681202 | TTCAGTTTGTGAATGTCATGTGG | 4831 |
| hs132681293 | CAACCTTCCCATATGTGTGGAGG | 4832 |
| hs132678662 | TTTGTCTAGTGACTGACAGAAGG | 4833 |
| hs132680060 | GATTTGAAGAAGAATATGGAGGG | 4834 |
| hs132679183 | GGTTTAATTTTGGATAAGTGGGG | 4835 |
| hs132681770 | ATCTGAGAGGACGACAGCTAGGG | 4836 |
| hs132679461 | AGCAGATCAGAGGCTTCAGTAGG | 4837 |
| hs132677737 | ATTTAAACTAATCTTAGTGGTGG | 4838 |
| hs132681174 | GGCATACAGGAATTTTTTGGGGG | 4839 |
| hs132679206 | GTAGGAAGTACATAAGACATAGG | 4840 |
| hs132681135 | CCACCAATTTAACTGTAACTCGG | 4841 |
| hs132677511 | TCCTTATGTGTCAGACGAGGGGG | 4842 |
| hs132682692 | ACATTATGTAAGACTAGCCCAGG | 4843 |
| hs132680514 | ACCCACCTATTCATTTCCCAAGG | 4844 |
| hs132679861 | AAGTACAGTTCTCTTTCTAACGG | 4845 |
| hs132680114 | TTTAAAGTTAATTTTATAGGGGG | 4846 |
| hs132679646 | TTGTCTTTCTGGAAATGAGGAGG | 4847 |
| hs132683106 | TCACATGATATTGCCCAAAGAGG | 4848 |
| hs132682919 | GCATCGTTTTGGAGTGTGCATGG | 4849 |
| hs132682994 | AGTCCTATGAGAAGCAGGCAGGG | 4850 |
| hs132681946 | GAAAAGTGAAGACATTTGAAGGG | 4851 |
| hs132679570 | TTACTTTATGTAGCTACTGAGGG | 4852 |
| hs132680589 | GTAGCAGAGGTAAATTGCCATGG | 4853 |
| hs132678882 | CACCCCTAGGGTATAATAGGAGG | 4854 |
| hs132682232 | AGTCCTGCTAGATCAGGCATAGG | 4855 |
| hs132679781 | TAGTGATAAATCGAATAAGTTGG | 4856 |
| hs132681124 | TTCCTAATTCTTGATCCAAGTGG | 4857 |
| hs132677407 | GCATTTGAGATAGCCAGTGATGG | 4858 |
| hs132679031 | CCTTTAAATGAAGATCACATTGG | 4859 |
| hs132683162 | CTAAAATGTGAGCCCATCAAAGG | 4860 |
| hs132680456 | TGAGTTGGTAAACAACCTTAAGG | 4861 |
| hs132680459 | TGGAGCCTAGACAGAGACATTGG | 4862 |
| hs132677290 | TAAAGTGAACCAAATCAAAGTGG | 4863 |
| hs132678846 | GCTAAGGCCTGGAAGCCTCAAGG | 4864 |
| hs132682770 | GCTCTTGTGGTTACAACAAGAGG | 4865 |
| hs132681987 | TCTACCCTGATTTTTGGAGGAGG | 4866 |
| hs132679459 | AAGAAACCCAGCAAGCTGAAAGG | 4867 |
| hs132681335 | AATATAACCTCAATTGCAAGAGG | 4868 |
| hs132681842 | TGCCAGTTCCCTGTGCTAAGAGG | 4869 |
| hs132680458 | AGGTTGTTTACCAACTCAGTAGG | 4870 |
| hs132677509 | TTTCCTTATGTGTCAGACGAGGG | 4871 |
| hs132678996 | GGGATTCTGAAGAAGTTCCTGGG | 4872 |
| hs132678184 | CCTAAACTTTGGTGTGCAGGAGG | 4873 |
| hs132677712 | CCATGGGGTAGGATGGTTCGAGG | 4874 |
| hs132679571 | CTTACTTTATGTAGCTACTGAGG | 4875 |
| hs132679276 | AGTTAATATCAAATTCTATGAGG | 4876 |
| hs132681076 | TACTTTTAGTGTCAACAAAGAGG | 4877 |
| hs132682582 | TTTCATGGAACAAAAAGTCACGG | 4878 |
| hs132679830 | CCAAAGGACTGAAACTTGAAAGG | 4879 |
| hs132682334 | TTAGGATTAGCTTATCCCAAAGG | 4880 |
| hs132682855 | AAAAATGTCTTCGATCTACAAGG | 4881 |
| hs132681491 | TGTGTAATCATGGGTAGTGTTGG | 4882 |
| hs132682659 | CAGCTAGTAATGTAAAATGGTGG | 4883 |
| hs132679284 | ACATTAATATCATCATCAAACGG | 4884 |
| hs132681276 | GAAGCACGAATATAAAACAAAGG | 4885 |
| hs132680872 | TAGGAATAAGTAATTCTGATGGG | 4886 |
| hs132682849 | CTGACTGACATAATAACTGCAGG | 4887 |
| hs132677673 | CTATCTCGTAAATAAGAGCTGGG | 4888 |
| hs132679208 | ATCATAGATTCTTTGCTAAGGGG | 4889 |
| hs132681796 | ATTATACACAGAAAAGCTGCAGG | 4890 |
| hs132677480 | ATTGTTATATCATTTGACATCGG | 4891 |
| hs132681556 | GTGTGTACATATATGGGTGGTGG | 4892 |
| hs132678103 | GCTTGGCTAGGGTTGTATTGGGG | 4893 |
| hs132677498 | AAGGAACTGGCACTTTTCAGTGG | 4894 |
| hs132681184 | TTCTGATGACCCTAGATCCAGGG | 4895 |
| hs132677386 | AACTTGATTTCCATTAACGATGG | 4896 |
| hs132678759 | CAGGAGCAGAGCCTTGAGATGGG | 4897 |
| hs132678937 | TTTATTTTCAGATAAAGCACAGG | 4898 |
| hs132682103 | AAAAAGCTAGTAAATGGAAGGGG | 4899 |
| hs132677819 | GATCCTTGCACAAACAAGCCAGG | 4900 |
| hs132682367 | TGGTTTTGTCTGGGAATCGGTGG | 4901 |
| hs132677236 | CTATAGAGTAAGTTGCAGGCAGG | 4902 |
| hs132681920 | AAATACTGAAAGATGTAGATGGG | 4903 |
| hs132677296 | CTTTTAACCTGAAAATCCAAAGG | 4904 |
| hs132680680 | ATTCAGTGTCAGGACAAAGATGG | 4905 |
| hs132680323 | AGTGTCTCCAGTGCCAGAGAGGG | 4906 |
| hs132679277 | TTGGTCTTGCAAAGGGTCAAGGG | 4907 |
| hs132681949 | CTAGGCTGAAGGATGATAGTGGG | 4908 |
| hs132677438 | GATGACTTCCCAGTAGGTGGAGG | 4909 |
| hs132681704 | ATAAAACTTGTTGAATCACTCGG | 4910 |
| hs132679905 | ATATTTTCTCACTCTTTCAGAGG | 4911 |
| hs132678020 | CAAAGTGGTAATTTGCCAGTAGG | 4912 |
| hs132679138 | AGAGGAGGCGAGGTAGAGGAAGG | 4913 |
| hs132681503 | CACTGCCTTTCAGTACCTACGGG | 4914 |
| hs132682311 | CCATTTTAGTGATTTCTGGAAGG | 4915 |
| hs132681035 | ATTGCTAGTCCCCACTTACAAGG | 4916 |
| hs132680441 | GGAAATTCAAGAAGGGATGACGG | 4917 |
| hs132679979 | ACAACTATGAAAAAGAGCATTGG | 4918 |
| hs132682668 | AGTGTCCTTACACTATTCGAAGG | 4919 |
| hs132677975 | ATGAAAAGAGTGGTGAGGTAGGG | 4920 |
| hs132679546 | TGTTTACTATCCCAAAGTTGGGG | 4921 |
| hs132677357 | CCATATCAGAAAATAAATGAAGG | 4922 |
| hs132683225 | AATAAATAAAAAGTAAACCTAGG | 4923 |
| hs132682671 | GTTAAAATCAGTCACTTCAGAGG | 4924 |
| hs132678505 | CTGCATGTAGATCCTTATGTGGG | 4925 |
| hs132681028 | TTCATCACTATCATAGAGATGGG | 4926 |
| hs132682098 | TGCTTGTGTAATTAACTCCATGG | 4927 |
| hs132677805 | CATTATTCAGATCATTGCAAAGG | 4928 |
| hs132680752 | TGTCCAGGTGAAAGAAATGCCGG | 4929 |
| hs132682418 | AATCTCTTTCCCTTCAAGAGAGG | 4930 |
| hs132682620 | CCAATTATAGCTATCTAGCTCGG | 4931 |
| hs132678197 | TGCTTGTGATCAAGAATGGATGG | 4932 |
| hs132677987 | TTCTGGCTGTGAGAGGCATAGGG | 4933 |
| hs132681764 | GATTTTGTTTAGAAGTAGCAAGG | 4934 |
| hs132679667 | TTTGGTAGAGATAGGCAGTAGGG | 4935 |
| hs132681347 | GAAAATGTGTTACAGTAAGGAGG | 4936 |
| hs132680059 | TGATTTGAAGAAGAATATGGAGG | 4937 |
| hs132679378 | TGCAAAAGTAAAGAAAAAGTGGG | 4938 |
| hs132679421 | CTTAAAATATTGAAATAGCGAGG | 4939 |
| hs132679677 | GCTAAAATATATGTGACTGTAGG | 4940 |
| hs132679742 | GTTTCCTTAAAGCCCTCTGAGGG | 4941 |
| hs132677713 | GTGTGATCCATGGGGTAGGATGG | 4942 |
| hs132681622 | AGAGGTTTGAGATTCACAAAAGG | 4943 |
| hs132678348 | CGTAATTGTTTCCCTTGAGGGGG | 4944 |
| hs132680439 | CAGTGTTAGGAAATTCAAGAAGG | 4945 |
| hs132679417 | TCTTCATCAACAGTTTGGAAAGG | 4946 |
| hs132677693 | TGTCACCACCAACGATGACTGGG | 4947 |
| hs132678263 | TACCACCCAGGGAATACAGCAGG | 4948 |
| hs132680127 | TTGTTACTAGAACTAAAATGAGG | 4949 |
| hs132680063 | TCAAATCAAAAAACGTAGAACGG | 4950 |
| hs132678311 | ATAAAGACAATATTTCCTATGGG | 4951 |
| hs132679356 | CAATCTAGATAGTATTTCCGTGG | 4952 |
| hs132683233 | TTTGAGATTGGATCTCCTAGTGG | 4953 |
| hs132678700 | CATGTATCATTAGGGAGTAGAGG | 4954 |
| hs132682200 | AAACAATCTAAAACTTGCAATGG | 4955 |
| hs132677250 | CTAAAACTGGTGAATGCAGATGG | 4956 |
| hs132679695 | GGACTTCTAACTTAAGACAATGG | 4957 |
| hs132680921 | TTTTAGGAACTTCTGGGCTGGGG | 4958 |
| hs132679899 | GTAATCCACTGAAGGAACTCAGG | 4959 |
| hs132677100 | ATTACATAGAAGCATTAGAAAGG | 4960 |
| hs132680507 | GATAAGGACTCTGAAATGCAAGG | 4961 |
| hs132677646 | TCCCCATACTTAAGATCAAGTGG | 4962 |
| hs132681781 | AGATGTTTATTTTAGGACTGTGG | 4963 |
| hs132680347 | CATTAAATGTAAATAATCCGTGG | 4964 |
| hs132679733 | CACCAAATACAGGCAGTCACAGG | 4965 |
| hs132680124 | TATAAAGGAAATGGGTTCAGTGG | 4966 |
| hs132681786 | TCTAAAGAAGATGGATCACCAGG | 4967 |
| hs132679537 | TTGGATTTCATGCCATGGCAAGG | 4968 |
| hs132679591 | GTTCTATTTTGGAGAGAAGGAGG | 4969 |
| hs132677350 | TATGGCCATATAAATTTCAAAGG | 4970 |
| hs132677830 | CTAAGCTCCCTCTGGAATGGAGG | 4971 |
| hs132681840 | AAGAACTCTTGGGCCAGTGTAGG | 4972 |
| hs132681074 | ATAGGTTTGGTGGACAAACTAGG | 4973 |
| hs132681471 | TAGACAGAGGTTTCCCTCCACGG | 4974 |
| hs132681574 | TGTTACTCCATAGTCAATGATGG | 4975 |
| hs132681861 | GCATGAGCTTCATACTCACTTGG | 4976 |
| hs132678517 | GTTTCTGAACTAGCAGTGCCCGG | 4977 |
| hs132680215 | GGAGATGGTTTTGAGTACTCAGG | 4978 |
| hs132681313 | TCTTACACTAGTACCCTTCAGGG | 4979 |
| hs132681410 | TGCTACAGAAGTATAAATGATGG | 4980 |
| hs132681916 | AATACCTTCCGTCATTCCAATGG | 4981 |
| hs132682711 | CCTACTGTTAAGACACAGGATGG | 4982 |
| hs132680525 | AATTCTACAGTAACTGGGGTTGG | 4983 |
| hs132679729 | ATGATTAGAATAGGGAACCTAGG | 4984 |
| hs132678757 | CTTAACACCCCGTTGACCAAAGG | 4985 |
| hs132682001 | GATATTTGAAACAACAAGCAAGG | 4986 |
| hs132681495 | ATTGTAACCTAAACTGCCTGTGG | 4987 |
| hs132677163 | ATTTTGCTCCTGGCCAAAGGAGG | 4988 |
| hs132678470 | GGCCCTTTCATATCTCTGTACGG | 4989 |
| hs132682891 | ATTGCAGTGAAAGAAATTTGCGG | 4990 |
| hs132679321 | AGGTGTGATCTAACCAGCATAGG | 4991 |
| hs132681450 | TTATTACAAGTCACTCTTTGGGG | 4992 |
| hs132679679 | TGACTGTAGGAATCCTCTGTTGG | 4993 |
| hs132678879 | TCCCTCTTGATTACACCCCTAGG | 4994 |
| hs132679360 | GTATTTCCGTGGGGGTAATGAGG | 4995 |
| hs132680917 | GCTGGGGAAATGTGGCCTGAAGG | 4996 |
| hs132678151 | TTCTTACAGCTCCTTCACATTGG | 4997 |
| hs132680997 | GCTTACTTTAGAGCAGTCACAGG | 4998 |
| hs132678059 | CTATATGCAGAATCGTGTATGGG | 4999 |
| hs132679480 | TTTGATGTTATGTACTTAGGAGG | 5000 |
| hs132683259 | ATTAGGAATGCAATATATGGAGG | 5001 |
| hs132681001 | TGTCCCTGATGCTGGAAAAGTGG | 5002 |
| hs132679053 | AATTTGTGTTTCAAAAAACTGGG | 5003 |
| hs132680576 | GAATAGGATGGTTTGTAAAGGGG | 5004 |
| hs132679155 | TGAAGATCTAAAGTGAAGCCAGG | 5005 |
| hs132677755 | CTGTAGGTCCTCAGGACACATGG | 5006 |
| hs132677708 | GCATGAACTGGCCATGAACATGG | 5007 |
| hs132677601 | AAGAGGTAGGTCATTCAGCCAGG | 5008 |
| hs132682853 | TCTTCGATCTACAAGGTCTACGG | 5009 |
| hs132681246 | TCTTATGCCTAGATGTACATAGG | 5010 |
| hs132678536 | GGAAAGGCCAGTCTATTGACAGG | 5011 |
| hs132681052 | TTATTGTTTGCTCCATACAAAGG | 5012 |
| hs132680918 | CAGAAGTTCCTAAAATCTTGTGG | 5013 |
| hs132681077 | ACTTTTAGTGTCAACAAAGAGGG | 5014 |
| hs132683094 | TTATATGTTTTGTTACAAGTAGG | 5015 |
| hs132679715 | GTGAAAAGTAATACTTCCTAGGG | 5016 |
| hs132679141 | GGGCATTTTGTGCAATGCTGAGG | 5017 |
| hs132681683 | ATAAACGTATTTTTCCCTTGAGG | 5018 |
| hs132682284 | CATGTAGTCTCTAAAGGCACAGG | 5019 |
| hs132677456 | TGCGAGTTACACACATCGACTGG | 5020 |
| hs132677502 | CAACTACACCGAATCTCACATGG | 5021 |
| hs132680991 | ACACCCCATCAACAATAAAGTGG | 5022 |
| hs132680847 | CAGTAGTTGTGGCAACCTATGGG | 5023 |
| hs132679772 | ATAAATGCAGTAAAAAGCCTAGG | 5024 |
| hs132678864 | GTGATCATTCATTTAAACCTCGG | 5025 |
| hs132678147 | CATCTTTGAAAAATTCAAGAGGG | 5026 |
| hs132681735 | TTCTTCCTGATTACATCCAGTGG | 5027 |
| hs132680443 | ATGGATTTGAAAGGACAAGAGGG | 5028 |
| hs132680932 | TCTAGACATATAATTTTAAGGGG | 5029 |
| hs132679188 | TTTCCATTTGAATATCCCACAGG | 5030 |
| hs132678896 | CTAAAAGACACACTACTGATGGG | 5031 |
| hs132677621 | ATTGCAGGTTGGAGGAGGGTGGG | 5032 |
| hs132682526 | TGCCTTTTCCAGGTTTTCTGAGG | 5033 |
| hs132677038 | AATTAATCTGCCGAAGATGACGG | 5034 |
| hs132678770 | GGCACACACTGGAATGGCACCGG | 5035 |
| hs132681025 | ACTGGAAGAGATATACAAGATGG | 5036 |
| hs132678137 | TTTAAAATATTCTGTAGCCAAGG | 5037 |
| hs132680928 | TTGCTCGGACAGAGTCTGTAGGG | 5038 |
| hs132678066 | GACTGGGGATACAATGTGGATGG | 5039 |
| hs132678692 | AAGTCTCCCACACATGATGCAGG | 5040 |
| hs132677408 | ATAGCCAGTGATGGAAATGAAGG | 5041 |
| hs132679160 | TAGTAAGGATGGATAAGGAGTGG | 5042 |
| hs132681330 | TATTAGACACAAAAATTGGAAGG | 5043 |
| hs132681302 | CCTCCAAGCATATCAAGTACAGG | 5044 |
| hs132682075 | GGAATTTTCTTTAGCTGGCAGGG | 5045 |
| hs132682838 | TATTTTCAATGATTTTCCATGGG | 5046 |
| hs132678638 | CAAACTATGACGCGAGAGGATGG | 5047 |
| hs132680455 | GTAGGTAGTATGTTATCCTCAGG | 5048 |
| hs132681322 | TGACGCTTCTTGCAGGCAGAAGG | 5049 |
| hs132682439 | GTTTACTGAAAGGCATACCTAGG | 5050 |
| hs132678880 | CCCTCTTGATTACACCCCTAGGG | 5051 |
| hs132679211 | CCAGTTACCATAAAAAGACATGG | 5052 |
| hs132679897 | TTTTACCTGAGTTCCTTCAGTGG | 5053 |
| hs132681147 | TAGAGATATAATAAGTGGAAGGG | 5054 |
| hs132678833 | TCAGACACTCCCATTCCAATGGG | 5055 |
| hs132678071 | TGAAAAGGATGCGGGAAAGGTGG | 5056 |
| hs132680676 | AATTAGAATTGTCTTTCAGAGGG | 5057 |
| hs132677825 | CTCAATACCATGGTAGGAGGAGG | 5058 |
| hs132678119 | CATCTCTTAACTACAGTGCCAGG | 5059 |
| hs132678422 | GCCACCACAACAGAGAAGGTTGG | 5060 |
| hs132683148 | TTATTTTGTAAAGCTACGGAAGG | 5061 |
| hs132681507 | GTTTCCTGAACCAGGAACATAGG | 5062 |
| hs132683210 | AACAATATATAAATAGAGGATGG | 5063 |
| hs132682280 | TTCTACCCTGCTACTTGTAGAGG | 5064 |
| hs132680735 | ACCTGATTTATTCAAAGAGGAGG | 5065 |
| hs132682196 | ATTAAAATAACCAATCCTCTAGG | 5066 |
| hs132680849 | GCAACCTATGGGATTAAGTAGGG | 5067 |
| hs132678878 | TCATAGCATACCAATTAAGCAGG | 5068 |
| hs132680004 | TTATAGGAAGAAAGTTATGAAGG | 5069 |
| hs132678832 | GTCAGACACTCCCATTCCAATGG | 5070 |
| hs132677115 | CAAAGTTTATATGTGATCCAAGG | 5071 |
| hs132680374 | ACAGCCCACTCCTAGCCCATGGG | 5072 |
| hs132683145 | CGTAGCTTTACAAAATAACAAGG | 5073 |
| hs132678465 | GACCGTACAGAGATATGAAAGGG | 5074 |
| hs132682246 | GGACTGCAAAGCACTCAAGCAGG | 5075 |
| hs132677615 | AAGCTTACGGCAAGGATGCAGGG | 5076 |
| hs132681101 | ATATTGTGATTTAAGGGCGTAGG | 5077 |
| hs132678741 | CCAATAAATCAACCTACAGTAGG | 5078 |
| hs132679629 | TTTTCAACTGGTAGTTGGGGAGG | 5079 |
| hs132678328 | AGCCTACTAAAGAGAATGAAAGG | 5080 |
| hs132682599 | TATTGCCACGGAAGAAGGCTGGG | 5081 |
| hs132681136 | CGAGTTACAGTTAAATTGGTGGG | 5082 |
| hs132678730 | CAATATTTAAGAAAAAACTTAGG | 5083 |
| hs132678278 | TAACAACAATTAGTTAAAAGCGG | 5084 |
| hs132677365 | TCACCAGAGATAGAAATATGAGG | 5085 |
| hs132683132 | TAACATATCAATAAATTACATGG | 5086 |
| hs132679094 | TATTAATCCATCCCTGGCATAGG | 5087 |
| hs132677035 | ATAGCTTTAGTTTTCAAAAGGGG | 5088 |
| hs132681275 | AAGCACGAATATAAAACAAAGGG | 5089 |
| hs132679682 | CACCAACTTATCTATTGCAAGGG | 5090 |
| hs132680284 | CATCTATCTCTTTAGGACCAGGG | 5091 |
| hs132679799 | TCCTCCTTCTCTCTTACTGGGGG | 5092 |
| hs132680348 | ATTAAATGTAAATAATCCGTGGG | 5093 |
| hs132678005 | GTGGTGATAAACAGCATTGGAGG | 5094 |
| hs132678275 | GCTGTTGAGTGACAGTTAAGTGG | 5095 |
| hs132678473 | CCAAGGAACAAGGTCCCTATGGG | 5096 |
| hs132677687 | GACTGGATCCCAGTCATCGTTGG | 5097 |
| hs132677734 | CATTTTAAAACTCTTAGTGGTGG | 5098 |
| hs132679768 | TGATAGATAAATGTAAAGCTGGG | 5099 |
| hs132678354 | GTCTAGATTTGGAGAGACAAGGG | 5100 |
| hs132680950 | AGTAGAAAAATTCTTCCCATGGG | 5101 |
| hs132681522 | AGGGTACTCTTTAAATCTAGTGG | 5102 |
| hs132679292 | GAAGACTACAAGCCATATGATGG | 5103 |
| hs132681372 | TATTTTTCATCTTTATGCGATGG | 5104 |
| hs132681655 | TGGTGAACTCTGGTCTTCCATGG | 5105 |
| hs132681383 | AGTGAGAACGAGGATGAGGGAGG | 5106 |
| hs132681474 | GTAGCTGATAGAGGTGAGAAAGG | 5107 |
| hs132679540 | AGATGGATTTTACCTTGCCATGG | 5108 |
| hs132681598 | ACTTGGTCACACTATATAAGTGG | 5109 |
| hs132677843 | AATCTGTTAAATAGAAACATAGG | 5110 |
| hs132678723 | AATTTGCTGTGATAAACAGTGGG | 5111 |
| hs132681719 | AAAGTAAACTTAAAATTAGGAGG | 5112 |
| hs132680850 | TGGACCCTACTTAATCCCATAGG | 5113 |
| hs132679699 | AGAGCAGTGTGTAAAAGGATTGG | 5114 |
| hs132678376 | TGTCCTTATAGCTTCTTGGTGGG | 5115 |
| hs132679152 | AAATCAGTCTAAATACTGCCAGG | 5116 |
| hs132679162 | GGATGGATAAGGAGTGGGAGTGG | 5117 |
| hs132680409 | GCCTAGTCCCAATTTCTGGTGGG | 5118 |
| hs132682840 | GTTTAGCTCGCTAGCTAACAGGG | 5119 |
| hs132681966 | TTGTACTATGAAGGATACTTGGG | 5120 |
| hs132677883 | TACAGAATAAGAAAGCACTAGGG | 5121 |
| hs132680543 | CCACAATTAAGAAAAGATGATGG | 5122 |
| hs132681872 | AGTTACAATGAGTTCTTCAAGGG | 5123 |
| hs132681504 | GCACTGCCTTTCAGTACCTACGG | 5124 |
| hs132682293 | TACTAGATATTACTCACTCAGGG | 5125 |
| hs132677762 | CTGCTTTGCTCAAATGTCAGGGG | 5126 |
| hs132681467 | AGTTTGAGCTGCAGCACCCGTGG | 5127 |
| hs132680758 | TAGCACAGATACAATTAAGCAGG | 5128 |
| hs132677364 | AGAGATAGAAATATGAGGCATGG | 5129 |
| hs132679550 | TCCCAAAGTTGGGGGGACATGGG | 5130 |
| hs132682239 | GCTGAAGCTGACGCTGACACGGG | 5131 |
| hs132680641 | AAAAAAATGTCAACGAAGCAGGG | 5132 |
| hs132679494 | TTTGACAACGTGTCTCAAGAAGG | 5133 |
| hs132677605 | TTTAAATTTAAGGTTCAAAGAGG | 5134 |
| hs132682721 | TCCCTGCCAGAACAAGCAAAAGG | 5135 |
| hs132677812 | TCTTGGCAGGAAACAATTGATGG | 5136 |
| hs132680399 | TTCCTTTATCCAGTTATCTGAGG | 5137 |
| hs132683058 | TCAGAACTAAAGTTTTTGAAGGG | 5138 |
| hs132679309 | TGACATCTGAATCTATGAAAGGG | 5139 |
| hs132678304 | ATGCTCTTGCCAGATTTGTAGGG | 5140 |
| hs132682113 | TTAAAAGGTACCTACCCATAGGG | 5141 |
| hs132681936 | TCTCATATAGAAGCTATTGTGGG | 5142 |
| hs132681962 | TGGGAGCAGGTTGGAGAAGAGGG | 5143 |
| hs132679990 | GTATCTCTACTTCGTCTACTGGG | 5144 |
| hs132679032 | TTAAATGAAGATCACATTGGAGG | 5145 |
| hs132682703 | TATCCTGTCACATTACACTTAGG | 5146 |
| hs132681549 | CCTGTCAGTATTGACCCCTTGGG | 5147 |
| hs132678202 | ATACAGATTAAAGAACCAAAAGG | 5148 |
| hs132677260 | GGTGTATGTTGAAGATGAAAGGG | 5149 |
| hs132678076 | ATATCCCAAAACCTCCATTACGG | 5150 |
| hs132680191 | ATTGATGTACAAGCCCGAAAAGG | 5151 |
| hs132677058 | TGACTGGTATATTCCAAGAATGG | 5152 |
| hs132680363 | AGGATATGCCCCTTTATGATGGG | 5153 |
| hs132681092 | GGCTTGGTTTGTGGTCAAGATGG | 5154 |
| hs132680933 | TGTCTAGAAAAGCTTTTGCTCGG | 5155 |
| hs132681148 | TTAGAGATATAATAAGTGGAAGG | 5156 |
| hs132678012 | GTTGTCTAACCTTTTGGCAAGGG | 5157 |
| hs132677517 | ATCAAGTCGGTACACTCGGATGG | 5158 |
| hs132680998 | ACTGCTCTAAAGTAAGCTAAAGG | 5159 |
| hs132678013 | GGTTGTCTAACCTTTTGGCAAGG | 5160 |
| hs132679344 | TTAGTACCATAGTTATACTCAGG | 5161 |
| hs132678513 | TCATCTTGAGACAAGAGCTCAGG | 5162 |
| hs132677294 | CATTTGTGAAGGTGTTTAAGTGG | 5163 |
| hs132678181 | TATTATGTGTATAGTATGGATGG | 5164 |
| hs132678641 | GCCACGTGACACAGAAATGAAGG | 5165 |
| hs132677657 | TCCCACTTGATCTTAAGTATGGG | 5166 |
| hs132677462 | AGCAGTTGCAAAGTAAAGAATGG | 5167 |
| hs132678044 | TGCCATGGCTGTTTGTTAGAGGG | 5168 |
| hs132679757 | ATCTAGTGTTTGATTGAGGACGG | 5169 |
| hs132678074 | GCAAAAAATTGAAAAGGATGCGG | 5170 |
| hs132679374 | ATTCAATCAGTAGATAAGCTTGG | 5171 |
| hs132678084 | GTAGTTTGACATGACCGTAATGG | 5172 |
| hs132682604 | CTTGGCCTATCTCAGGGTACAGG | 5173 |
| hs132681102 | TATTGTGATTTAAGGGCGTAGGG | 5174 |
| hs132677363 | GAGATAGAAATATGAGGCATGGG | 5175 |
| hs132677749 | AATTGCATAGCAATCAAAAAGGG | 5176 |
| hs132680790 | GAAAAGAACAGAATGTCCTTGGG | 5177 |
| hs132680262 | TTTAGCTCTGTGCTAATGAAAGG | 5178 |
| hs132680149 | TCAAATATGGTCCTGCACACAGG | 5179 |
| hs132677169 | CAGACTTCAACTTTCTACCCTGG | 5180 |
| hs132677193 | AGAAGACTTATAAAAGACCTTGG | 5181 |
| hs132681071 | CTAGGAACTGGAGAATATATGGG | 5182 |
| hs132679178 | TAAGAAGAGGTGTAGTAGAGAGG | 5183 |
| hs132681854 | CAAGGCAGCTATATAGCAAAGGG | 5184 |
| hs132682182 | TTCTAGATCAGCTTTAACAATGG | 5185 |
| hs132681291 | ACACACACCTCCACACATATGGG | 5186 |
| hs132678660 | TGAAACTGTAACAGTTGTAAGGG | 5187 |
| hs132681652 | AAAGTTTGTCTAGGATGCCATGG | 5188 |
| hs132677258 | CACCATGTCTTTGTTGCAGGTGG | 5189 |
| hs132680873 | ATAGGAATAAGTAATTCTGATGG | 5190 |
| hs132679477 | CTATAATAGAGCCCTTCGGCAGG | 5191 |
| hs132680356 | ATTAGACGAGCAAAAGGAAGAGG | 5192 |
| hs132679095 | GGATACTCCTATGCCAGGGATGG | 5193 |
| hs132683109 | TGAGTCCTGGATTTTTAATGTGG | 5194 |
| hs132679650 | TCTTTGTCAGTTCCCACTATCGG | 5195 |
| hs132679782 | GATAAATCGAATAAGTTGGTAGG | 5196 |
| hs132677490 | TCTAATGTATTTGAAAAATGTGG | 5197 |
| hs132679582 | CAGAATAGCCCAGTCAAAAGAGG | 5198 |
| hs132682653 | AAGTAATTAAAATCTGAATGTGG | 5199 |
| hs132682430 | CATGTTAAATTAAGGTTTAGGGG | 5200 |
| hs132677287 | GTTCAAAAAGAAACACAGATAGG | 5201 |
| hs132677788 | TCTAGAATCTAAATAAGGCTAGG | 5202 |
| hs132682952 | ATATGCAAGCTAAATATGCTTGG | 5203 |
| hs132678196 | AATATGCTTGTGATCAAGAATGG | 5204 |
| hs132678619 | CTGACAACTCCAAGGCTGGATGG | 5205 |
| hs132681785 | CGACTTGGTTCTAAAGAAGATGG | 5206 |
| hs132683074 | GCTTCCTCAAACACAGGGAAAGG | 5207 |
| hs132679220 | GTAGGCCAAGCCAAATCAATCGG | 5208 |
| hs132679968 | AGTTACAGTCCAGTTACTTGAGG | 5209 |
| hs132681364 | GGGTCAACCAAAGTGTATAAAGG | 5210 |
| hs132678206 | GGAACCCAAGGAAATCAGAAAGG | 5211 |
| hs132683112 | TAATGTGGACATATATGTTGCGG | 5212 |
| hs132682713 | CCATCCTGTGTCTTAACAGTAGG | 5213 |
| hs132680906 | CTCACAGTAGTTTTACCCCATGG | 5214 |
| hs132679935 | AACATTATTACCAAAACCATCGG | 5215 |
| hs132681819 | AGTTATAGCTGACCTTTACTGGG | 5216 |
| hs132678567 | CCAAAAGAAACACATTTCAATGG | 5217 |
| hs132682819 | CATTTAGTAACAATAAATGTTGG | 5218 |
| hs132681159 | ATAAGATTACCTTTCTGGTAGGG | 5219 |
| hs132680020 | TACAGAATCTAAAGATTGAAGGG | 5220 |
| hs132682235 | GTAAAGCTAGACGGATCAAAAGG | 5221 |
| hs132678217 | GTATAAATCCTGATACTAGCTGG | 5222 |
| hs132679124 | AATTGCAATGAAATGTATGTAGG | 5223 |
| hs132677920 | GCACAGATTAGTGTCACCTATGG | 5224 |
| hs132682790 | TTTTAGCACACCTGGTGCAGAGG | 5225 |
| hs132681041 | GCCCAAATCATCAAAGCAGATGG | 5226 |
| hs132682056 | TACTTGGAATGGATGAGCAAAGG | 5227 |
| hs132682984 | TGGGGTTACTAAACATTCAAAGG | 5228 |
| hs132680162 | AAAATCCACCCACCCCACTAGGG | 5229 |
| hs132677222 | ACCACATCAGACCGTGGGAACGG | 5230 |
| hs132680553 | ATTAGACCTCTATTTGTGCTAGG | 5231 |
| hs132681420 | TTAGATCTAATTTGTATAGGGGG | 5232 |
| hs132680815 | CCATTGTGTTTCCCATCCCAAGG | 5233 |
| hs132681068 | AAGTATCTCTCATAGGTCCTTGG | 5234 |
| hs132678492 | GTTTTGTCTTAAATTTCTGGAGG | 5235 |
| hs132681952 | TTACTGACGCGTCCCCCAAACGG | 5236 |
| hs132677297 | TTTTAACCTGAAAATCCAAAGGG | 5237 |
| hs132679848 | TGCTGTTCTCCCCAAAGCAGGGG | 5238 |
| hs132679146 | TTTTTATAATAAAAGCTGTAGGG | 5239 |
| hs132677384 | TCAAGTTGTTATATGTAAGTGGG | 5240 |
| hs132677623 | AAAGATTGCAGGTTGGAGGAGGG | 5241 |
| hs132679628 | GCTTTTTCAACTGGTAGTTGGGG | 5242 |
| hs132680664 | CTTGCTTAAGGAAAACTGGATGG | 5243 |
| hs132678887 | CTGCCTCCTATTATACCCTAGGG | 5244 |
| hs132678708 | CAGACAACTGAGTAACCAAATGG | 5245 |
| hs132678558 | TTTATGATGGATTAAGGGTGTGG | 5246 |
| hs132682743 | CAATGTCTGTGAATTGCCCAGGG | 5247 |
| hs132678111 | GGGGTATGCATGGGAGCAGAAGG | 5248 |
| hs132681640 | AATGTAATTTTTGCTAAGTGCGG | 5249 |
| hs132681222 | TTATTTCCTGCATTAGTCAAGGG | 5250 |
| hs132677846 | CTAAGAAGAGACTGAGTGCTGGG | 5251 |
| hs132681799 | AATCTAGGCAAGCTGCTACAAGG | 5252 |
| hs132677426 | ATAATTTCTCAATTACCCTACGG | 5253 |
| hs132680113 | ATTTAAAGTTAATTTTATAGGGG | 5254 |
| hs132680823 | GAGCCCAGAACATCTCTTTGTGG | 5255 |
| hs132679131 | AGGTAGGGTGGGGAAAAAGTGGG | 5256 |
| hs132680047 | AACATTTACCCATAACGTAAAGG | 5257 |
| hs132681486 | CATGTGCATTTGCAAGACCTTGG | 5258 |
| hs132677518 | TTAACCACCCAAAGCTGCTTAGG | 5259 |
| hs132678758 | ACAGGAGCAGAGCCTTGAGATGG | 5260 |
| hs132678481 | CAGTGCCAGGATTTGAAGGCGGG | 5261 |
| hs132677681 | ACTTAGTCTCAGAGTGGGAGTGG | 5262 |
| hs132682033 | ATATTAGTGTGAATGTATGTGGG | 5263 |
| hs132681430 | ATCATCTTGCAGATACAGACAGG | 5264 |
| hs132680503 | CAAGTAATCTGGACTATCACAGG | 5265 |
| hs132679127 | TGAAATGTATGTAGGTAGGGTGG | 5266 |
| hs132680199 | GTATCTGACTACCAGTTTCAGGG | 5267 |
| hs132677888 | GCCTTGAAGAAAGGTGTTGGTGG | 5268 |
| hs132678057 | ATCGTGTATGGGGAGAGTACAGG | 5269 |
| hs132681349 | TTGACAACTTACTTATTGTGTGG | 5270 |
| hs132681024 | ACATAATGCAAAATGAGCACTGG | 5271 |
| hs132683126 | TTCCCTTTATTAAGCCGGCATGG | 5272 |
| hs132680183 | GGGTGAAGAAAGGAGAGTCGTGG | 5273 |
| hs132679157 | GTGAAGCCAGGTAGTAAGGATGG | 5274 |
| hs132679125 | GCAATGAAATGTATGTAGGTAGG | 5275 |
| hs132680536 | TGAGAATCTATATTCTACATAGG | 5276 |
| hs132678458 | AGTGCTCAATGGGTTTTTGGAGG | 5277 |
| hs132680586 | TCAAATTCAAATAACGACATAGG | 5278 |
| hs132677401 | CAGAATGTTCAATTTTATAGGGG | 5279 |
| hs132677106 | AATACTTTCCAAAAAACGTCAGG | 5280 |
| hs132680152 | AGTTTCCGTACTCCCCTAGTGGG | 5281 |
| hs132678626 | GGCTGGGGAAGAATGATTTGAGG | 5282 |
| hs132677858 | AAGGTTATAGCAGTGTAGGCTGG | 5283 |
| hs132680612 | TGAGAGACTTAAAATTAGGTAGG | 5284 |
| hs132679133 | GGGAAAAAGTGGGAGAAGAAGGG | 5285 |
| hs132677946 | ACCACAGGGCTCTTGGACAAGGG | 5286 |
| hs132680523 | TAGTGATGCCCAATGAGCCTTGG | 5287 |
| hs132679595 | GATGTTTATATTCTGACGAAGGG | 5288 |
| hs132680888 | AGCTAGAAGGTAACTTTAGGAGG | 5289 |
| hs132682483 | GCTTTTAGATAGTAACAAGATGG | 5290 |
| hs132683186 | TATCTTTTGGTTTCACCAAGTGG | 5291 |
| hs132677228 | CCCTGTAGTATGAATACCCCAGG | 5292 |
| hs132678921 | CTCCAGTGATACTTTAACATGGG | 5293 |
| hs132680436 | GTGAGGCCAGTTTGCTAAAGGGG | 5294 |
| hs132678839 | TGTTGAAAACTATGTCCCATTGG | 5295 |
| hs132681869 | ATCAGTGGAAAGCACTTGAATGG | 5296 |
| hs132678642 | CACGTGGCTATACTGTTCATTGG | 5297 |
| hs132679703 | AGATAGAATTGAGAAGACTATGG | 5298 |
| hs132678529 | TAAAGGACTCAAACTTTTCGCGG | 5299 |
| hs132682540 | TAAATGGGAGCTTTGCCAAAGGG | 5300 |
| hs132682145 | TCAACATAATAGGACAGCCCAGG | 5301 |
| hs132682048 | AGTTTATCTTTCCAGTAAGAGGG | 5302 |
| hs132678414 | TTACATTCTCCATCCAGTCCAGG | 5303 |
| hs132679275 | CTTTCTGCTAACTTTTTGAAAGG | 5304 |
| hs132678773 | CTTTGATGTGTCACGTCCAGAGG | 5305 |
| hs132677059 | GGATGTCGAACCACTCTGACTGG | 5306 |
| hs132680100 | ACTGTATTCTGTAATTGCTAGGG | 5307 |
| hs132680285 | GCATCTATCTCTTTAGGACCAGG | 5308 |
| hs132682192 | AATTTCATCCTATTCTGTATGGG | 5309 |
| hs132678750 | GATATGCCATCCTATTAAGTAGG | 5310 |
| hs132678478 | TCATGTACAATTCATCCCATAGG | 5311 |
| hs132682081 | TGGTAATGTGTTTATAAGAGAGG | 5312 |
| hs132677717 | AATTCACTGTGTGTGATCCATGG | 5313 |
| hs132682022 | CTGAAATGTCTCTCTAGCACTGG | 5314 |
| hs132681472 | ATCATTAGCGTAGCTGATAGAGG | 5315 |
| hs132681775 | TCGTCCTCTCAGATGCCAAAAGG | 5316 |
| hs132678945 | CCCTCCTACCTAAAACTATGAGG | 5317 |
| hs132681271 | GCACACTCTTTATGGTGAAAGGG | 5318 |
| hs132677147 | GATCCATTTTCAAATTCCATGGG | 5319 |
| hs132679902 | AATTAACTTCAATAGGGCTGTGG | 5320 |
| hs132683075 | CTTCCTCAAACACAGGGAAAGGG | 5321 |
| hs132678347 | CCGTAATTGTTTCCCTTGAGGGG | 5322 |
| hs132678588 | CTCAATCCCCTCATATACAGAGG | 5323 |
| hs132680510 | ATAAACACTTTCATTTATCAGGG | 5324 |
| hs132678381 | GACCTAATAATTTCATGCGCTGG | 5325 |
| hs132681160 | AATAAGATTACCTTTCTGGTAGG | 5326 |
| hs132677613 | GTAAGCTTCGACCTCAGCCTTGG | 5327 |
| hs132682586 | GTACTTGAAATGTTACTGTCAGG | 5328 |
| hs132680895 | TGTGTGACGTTTTTGTAAAGTGG | 5329 |
| hs132678918 | GTGAAAACCCTCAAAAGAAAGGG | 5330 |
| hs132680069 | GTATTATCCATTTGCAGTAGAGG | 5331 |
| hs132682506 | TGAATCATTCTAATTGGTGAGGG | 5332 |
| hs132683085 | GCCTCTACAGCCATTTAAGTAGG | 5333 |
| hs132680737 | AGAACCTGATTTATTCAAAGAGG | 5334 |
| hs132682524 | TTAGAAATATGAAGAAATCAGGG | 5335 |
| hs132679225 | ACATTATATGCATAAGACATAGG | 5336 |
| hs132680351 | ATGTAAATAATCCGTGGGGGTGG | 5337 |
| hs132679308 | TTGACATCTGAATCTATGAAAGG | 5338 |
| hs132682326 | ATGCTCAGAGTGGATCTGATAGG | 5339 |
| hs132677970 | GTTGTGAATTATACTGCCAATGG | 5340 |
| hs132678637 | CTATGACGCGAGAGGATGGCAGG | 5341 |
| hs132678781 | GATTTGGTTCTGCATCAGGCTGG | 5342 |
| hs132678190 | CTAGGGCTTACCTTAGAGGCAGG | 5343 |
| hs132678477 | CATGTACAATTCATCCCATAGGG | 5344 |
| hs132680662 | TCATCCTCCCTCATAAGTATTGG | 5345 |
| hs132677925 | TATTTGATTTTAATTGGCAATGG | 5346 |
| hs132679059 | GGCACATGTTGCATAAAACTAGG | 5347 |
| hs132677928 | TCAACTAAGATAGACACAAAGGG | 5348 |
| hs132679149 | ACACAATCAGATTTATATTGTGG | 5349 |
| hs132678298 | CACAGCATTTTCTCAGGCATGGG | 5350 |
| hs132680240 | CTTCTGGCTCCCTTCCCTCAGGG | 5351 |
| hs132680605 | TCCCCATTTTATCATGTGAAGGG | 5352 |
| hs132682055 | TTGCACTTAGTATTATAATGAGG | 5353 |
| hs132677362 | TCTCTGGTGATGTCATTGTAAGG | 5354 |
| hs132678530 | AAAGGACTCAAACTTTTCGCGGG | 5355 |
| hs132681927 | ATAGTGTACTTCAATTCTGCTGG | 5356 |
| hs132678052 | AGGCTAATGTCTATTCAAATGGG | 5357 |
| hs132678019 | GGTAATTTGCCAGTAGGATGAGG | 5358 |
| hs132681577 | CATTTTGGAGGCAAGAGTTGAGG | 5359 |
| hs132682509 | AGTTTAAAAATCCAAACAATGGG | 5360 |
| hs132678233 | GTTCTGTAGATGTTCTATAGAGG | 5361 |
| hs132681518 | ATTAGATGATGAGACAAAATGGG | 5362 |
| hs132679747 | AGTCAGTGCTTTTAGTTTTGGGG | 5363 |
| hs132679967 | GTTACAGTCCAGTTACTTGAGGG | 5364 |
| hs132677411 | GGTTGCTTTTCTGACAGAAACGG | 5365 |
| hs132683079 | GGAAACTCTGTAAAGGGAGTAGG | 5366 |
| hs132681602 | ACTTTGGGCCGAAAATTTCAGGG | 5367 |
| hs132678272 | TGATTTCCAATCAGGTAGGCAGG | 5368 |
| hs132679943 | GTTCTCAGTATGTGACCTGCTGG | 5369 |
| hs132679764 | AAAAAATGTACATAATACTTGGG | 5370 |
| hs132682368 | CCCAGACAAAACCAGAATAGTGG | 5371 |
| hs132681716 | GGAGGAATTGGTCTTTCAGAAGG | 5372 |
| hs132682135 | TTAGAATCCAAGTTTACTCCCGG | 5373 |
| hs132680810 | ATTAAAATATTAAATGGGACAGG | 5374 |
| hs132680195 | TATCAGATCTGCTGGTTACAGGG | 5375 |
| hs132681305 | GCATAGTGAAACTGATGCCCTGG | 5376 |
| hs132679955 | TATTCTTTAAAGTTCCTTGGAGG | 5377 |
| hs132682824 | GAGCTAGAAGTTTTTATGGATGG | 5378 |
| hs132681249 | AGTTCTTGCTATCATTAAGAGGG | 5379 |
| hs132677989 | GTTTTCCTTCTGGCTGTGAGAGG | 5380 |
| hs132680848 | GGCAACCTATGGGATTAAGTAGG | 5381 |
| hs132679177 | AAGAGAAAGATTATAAGAAGAGG | 5382 |
| hs132680108 | TTTTGTTCACATGTAGGCTGAGG | 5383 |
| hs132678174 | AGATTTGATTCAACTGTCCATGG | 5384 |
| hs132681692 | AGCCACAGCACAACAAAAAGAGG | 5385 |
| hs132681424 | TTTCATGCCCATCAAATATGAGG | 5386 |
| hs132682734 | GCCCATTCTTCCTAATAGGCAGG | 5387 |
| hs132682530 | TTTCTTTAAGAACAGACTGTTGG | 5388 |
| hs132677620 | GAGGAGGGTGGGTCTATCCAAGG | 5389 |
| hs132679051 | GTTCTCAATAGCAAATTGCTTGG | 5390 |
| hs132682793 | TTTGTTTTCTGTGGTTGAAAGGG | 5391 |
| hs132683209 | AGCACTGCCTCAGAGCAATTCGG | 5392 |
| hs132681070 | GAATCCAAAGTATCTCTCATAGG | 5393 |
| hs132677801 | ACAGGGACAAGACCAAGAACAGG | 5394 |
| hs132682195 | GCTTTGATCCCATACAGAATAGG | 5395 |
| hs132679674 | TGTGCTGAAGTCTAAGACAAAGG | 5396 |
| hs132677855 | GCCTACACTGCTATAACCTTAGG | 5397 |
| hs132681130 | ATAAAAGTTTTAAAAAGCAAAGG | 5398 |
| hs132678831 | GAGCATTCTTGGGCACCAGCTGG | 5399 |
| hs132680104 | TATTGATGTAAACGTTATGCAGG | 5400 |
| hs132678696 | TTTATCAGACATTTTCTCCTGGG | 5401 |
| hs132683025 | GAGCAGCCTGCACAAGACTTTGG | 5402 |
| hs132681552 | TGACATACTCTCCAGCTGCTAGG | 5403 |
| hs132681281 | AGCAAAATGTCTTAACACTAGGG | 5404 |
| hs132681489 | GGTAGTGTTGGCTTTATACCAGG | 5405 |
| hs132681326 | ATATATTAGCATATGTTCTAGGG | 5406 |
| hs132680239 | GGGATAATACCCTGAGGGAAGGG | 5407 |
| hs132679944 | AGAACTGCATAGGCTTTGTATGG | 5408 |
| hs132679120 | AAGCATTTAGAGGGGAAGACTGG | 5409 |
| hs132680941 | GTGTTCTGCAGCAGGTTAAGTGG | 5410 |
| hs132678653 | TGATCCACATGATCTGGCCTCGG | 5411 |
| hs132677093 | TATGATTCAGTACCTAGCTCAGG | 5412 |
| hs132681802 | TAAGTCTTTGACCTTTCTAAGGG | 5413 |
| hs132677790 | TTCGACTTTGGAGAAGCAAAGGG | 5414 |
| hs132682206 | GTTTGAGAAGACATAGGGAATGG | 5415 |
| hs132678854 | GATATTTATATATTCGGCTGAGG | 5416 |
| hs132680575 | ATTCTCTTACCTTTTGAGAAGGG | 5417 |
| hs132677729 | GAATTGTATCTCTTCAGAAAGGG | 5418 |
| hs132681086 | ATACTTTTGGGTGGAGAGAGGGG | 5419 |
| hs132680036 | ATAACACTGTTAACTTACATGGG | 5420 |
| hs132678026 | TGGAAATTAAAATACAGTAAAGG | 5421 |
| hs132677496 | CAGAAGAAAAAGTTTAACTAGGG | 5422 |
| hs132677127 | TGACAAGACCTGTAAATGCCCGG | 5423 |
| hs132678942 | CCTCATAGTTTTAGGTAGGAGGG | 5424 |
| hs132677375 | GCTAGCTGCAAGGAATAACTTGG | 5425 |
| hs132678007 | CCAATGCTGTTTATCACCACAGG | 5426 |
| hs132682028 | GTCCTAGTCTTGCAAATGCTAGG | 5427 |
| hs132682783 | AAGTGCCTTTTCTATTCAGAAGG | 5428 |
| hs132681230 | TACCATAAAAAACTTCTAAGTGG | 5429 |
| hs132678676 | GAAGTTTGCCAAATAATACTTGG | 5430 |
| hs132680570 | TTAAGACATTATTAAAGTGTGGG | 5431 |
| hs132677050 | GCAAAAGACCACAATCTACCTGG | 5432 |
| hs132677248 | CTATTGACTTGCACTCCCACAGG | 5433 |
| hs132683120 | TCTCCCAATGAGTGATATGATGG | 5434 |
| hs132681890 | TTTGAACCTGAATCAGATGATGG | 5435 |
| hs132677305 | CTTAGCGACAGTTATGTCCATGG | 5436 |
| hs132677662 | ATATATAGCTTCCAAGAATGAGG | 5437 |
| hs132680252 | CTTACACTTGCCATTGGTCGGGG | 5438 |
| hs132680885 | ATTCGCAGGTGGTACTTGGTTGG | 5439 |
| hs132679791 | TTTTATAACCAGTTGACAGATGG | 5440 |
| hs132678528 | CTAAGGTTAATTTCAACGAAAGG | 5441 |
| hs132683282 | ACACTATGAGAGAAATAAAACGG | 5442 |
| hs132679466 | TTTTCCCCCTAGTTTAAAAGTGG | 5443 |
| hs132677207 | GTGCCCCAGCTAGGTGTACATGG | 5444 |
| hs132683200 | GATCAGTTATAACAGACTTAGGG | 5445 |
| hs132678193 | CAGGTAAAGAAAACAATCTAGGG | 5446 |
| hs132681487 | CTAACAAGCTAGCAAAATCCTGG | 5447 |
| hs132683236 | TTACAAAATCAGACCCATAGAGG | 5448 |
| hs132678843 | TGTATTGCCTTATATACACCTGG | 5449 |
| hs132683187 | TTGATTCAGTTTAAGCCACTTGG | 5450 |
| hs132679193 | AGAGACTCCACTCTTTTGCTAGG | 5451 |
| hs132681896 | AACATTGATAAATTAAACATTGG | 5452 |
| hs132680249 | ATAATCCTTACACTTGCCATTGG | 5453 |
| hs132682605 | ATTTCACTTGGCCTATCTCAGGG | 5454 |
| hs132682462 | ACCTTTTCTAGGATAAAGCTTGG | 5455 |
| hs132678902 | TAGAGCTATTTTTAAAGCAGTGG | 5456 |
| hs132680203 | GCAAAGTGATCTCTGCCAGCTGG | 5457 |
| hs132677242 | TATTAGTTTGGCATCCCTGTGGG | 5458 |
| hs132677909 | AAAAAAATATCTTTCAGCCAGGG | 5459 |
| hs132681769 | CATCTGAGAGGACGACAGCTAGG | 5460 |
| hs132677671 | CATTGGTGCTCAATATACTAAGG | 5461 |
| hs132680886 | GCGAATTGGACAAAATTCAATGG | 5462 |
| hs132681247 | TATCATTAAGAGGGGACAAATGG | 5463 |
| hs132679118 | AATGTAACTAAGCATTTAGAGGG | 5464 |
| hs132678834 | AATGGGAGTGTCTGACCAGCTGG | 5465 |
| hs132680085 | CTTGAGTTAGGTGTAAAGAATGG | 5466 |
| hs132682600 | CTTCTTCCGTGGCAATATGCAGG | 5467 |
| hs132682115 | GGGCAACTAATTCTGAAAACGGG | 5468 |
| hs132678987 | ACTCTTGTGGGTGGCAGTAAGGG | 5469 |
| hs132680581 | GCACACACTCCCTTCTCAAAAGG | 5470 |
| hs132678167 | AAAGTAGTAGAAAACAATAGTGG | 5471 |
| hs132677541 | TCTTTTTTGCAAGATTGCATTGG | 5472 |
| hs132681301 | CCTGTACTTGATATGCTTGGAGG | 5473 |
| hs132677669 | ACTAAGGATTTTTCAATGCAGGG | 5474 |
| hs132678888 | CCTGCCTCCTATTATACCCTAGG | 5475 |
| hs132679470 | CAGGGGCCACTTTTAAACTAGGG | 5476 |
| hs132682996 | TGATAAGTCCTATGAGAAGCAGG | 5477 |
| hs132680731 | GGTAGAGAGTTTCTTTCCCAAGG | 5478 |
| hs132678509 | ACCTAAACTGCAAAGCAAACCGG | 5479 |
| hs132679034 | GGTCAAAATGTCACACCAAAAGG | 5480 |
| hs132682777 | TGAGCAAGAAGGTAACCAAAAGG | 5481 |
| hs132678726 | GCAAATTTAATCACCTCTGAGGG | 5482 |
| hs132680296 | CTCAACCTAATTTATTTCTGCGG | 5483 |
| hs132679274 | TCAAATTCTATGAGGTAGAGAGG | 5484 |
| hs132679391 | TGTATTTTGTCTTTGTGCAAAGG | 5485 |
| hs132680716 | ATAAAACTGAATCCTTAAGCTGG | 5486 |
| hs132678136 | TTAGCTAACTTGCTTTACCTTGG | 5487 |
| hs132678256 | AGGAAATAGTAGGGTGACATAGG | 5488 |
| hs132677870 | CTTTAATCCAGTGCCAGGCCCGG | 5489 |
| hs132681224 | TAGAGACCCTTGACTAATGCAGG | 5490 |
| hs132678108 | AAGAAGAGACGAATTTTGCTTGG | 5491 |
| hs132678514 | GCTCTTGTCTCAAGATGACTTGG | 5492 |
| hs132680881 | GCGTCTTGCCTACCTGTCTCCGG | 5493 |
| hs132679812 | ATGTATGTATGGTACATGTAAGG | 5494 |
| hs132681548 | GACAGGTCATCCCTAGCAGCTGG | 5495 |
| hs132681482 | ATTTGCATCATTGTCCCTGCAGG | 5496 |
| hs132677470 | TTTCTTCTATCATTTCCAAAAGG | 5497 |
| hs132680297 | TTGAGCAAGACTACACCTAATGG | 5498 |
| hs132683159 | TATACATTCCTGCCTTTGATGGG | 5499 |
| hs132679987 | AATATCCAAAAGTTAATCAATGG | 5500 |
| hs132682837 | TTATTTTCAATGATTTTCCATGG | 5501 |
| hs132680601 | TTTGGGAGAAGAAATTCAGTAGG | 5502 |
| hs132680879 | AATTCAGAAGGACCGGAGACAGG | 5503 |
| hs132677412 | CTTTTCTGACAGAAACGGTATGG | 5504 |
| hs132682650 | GAGTGAGTAGTATGAGCAAATGG | 5505 |
| hs132681512 | GGGATGAAAGAGGAGACAAAGGG | 5506 |
| hs132679898 | GGAACTCAGGTAAAACTAGTAGG | 5507 |
| hs132679849 | ATGCTGTTCTCCCCAAAGCAGGG | 5508 |
| hs132679700 | CTCAGACTTAGTCATCTAAAGGG | 5509 |
| hs132678001 | CAGACTGTTCTTGGGCCGCTGGG | 5510 |
| hs132680819 | TTTCAGGGACATATTCAGAAAGG | 5511 |
| hs132678106 | AGACGAATTTTGCTTGGCTAGGG | 5512 |
| hs132680687 | CTTAATTTTGTAATTTCCCAGGG | 5513 |
| hs132677414 | CTGTCAGAAAAGCAACCATTGGG | 5514 |
| hs132679153 | TGGAATAGACTAAACTGCACTGG | 5515 |
| hs132679163 | CCTTATCCATCCTTACTACCTGG | 5516 |
| hs132682126 | TTACCAAGTTTCCATTTACAAGG | 5517 |
| hs132682701 | GATGTACTATTTTTGAAGCCAGG | 5518 |
| hs132682742 | GCAATGTCTGTGAATTGCCCAGG | 5519 |
| hs132678485 | AAGACAAAACCCCAGAGAAAGGG | 5520 |
| hs132680634 | AAACACTCAGAGTAGACAACAGG | 5521 |
| hs132677121 | ACTTCCACGATTAAAAACATAGG | 5522 |
| hs132678443 | CATGCTCACGATTCTTGCCTGGG | 5523 |
| hs132677977 | ACTCTTTTCATGATTAGAGATGG | 5524 |
| hs132682419 | ATCTCTTTCCCTTCAAGAGAGGG | 5525 |
| hs132681393 | GGAGTCCTATAGGATAATTTGGG | 5526 |
| hs132680564 | TGTAAAGCTGGACTTCAAGTTGG | 5527 |
| hs132681303 | ATATTACTGCAGTACAAGCCAGG | 5528 |
| hs132679142 | GGCATTTTGTGCAATGCTGAGGG | 5529 |
| hs132681551 | GACATACTCTCCAGCTGCTAGGG | 5530 |
| hs132677761 | CCTGCTTTGCTCAAATGTCAGGG | 5531 |
| hs132679609 | CATCTTTAAAAAGTTTCTATGGG | 5532 |
| hs132677817 | TCGCCTGGCTTGTTTGTGCAAGG | 5533 |
| hs132679060 | TCATAAAATGTAATATCTGTTGG | 5534 |
| hs132681066 | GGTCCTTGGAGCAATCGTATTGG | 5535 |
| hs132682607 | GGTCTATTCATAGACTTGTATGG | 5536 |
| hs132679573 | GTATTCTTATTCCCATTATGTGG | 5537 |
| hs132680076 | AGTATTCTACTTAGAGAAAGAGG | 5538 |
| hs132679422 | ATTCCTTTACACTCTAAAAGTGG | 5539 |
| hs132681437 | GAGTCCCAAGTACACCTTGATGG | 5540 |
| hs132678010 | TTGACTTTGCCCTTGCCAAAAGG | 5541 |
| hs132681680 | GTGACATACAAAAAGTCTACTGG | 5542 |
| hs132677968 | ATTGTGTTAATGGATTATAATGG | 5543 |
| hs132679665 | GATCAGCCTTTGGTAGAGATAGG | 5544 |
| hs132679860 | TCTCTTTCTAACGGTAAAAGTGG | 5545 |
| hs132677145 | TTTTTGTCTAAGTATATATGTGG | 5546 |
| hs132681027 | TTACGTATGTATGACTTGCTTGG | 5547 |
| hs132680714 | TGTTGTACCTCAAATAGCTTAGG | 5548 |
| hs132682247 | TGGCATGTCACCTAACTGGCTGG | 5549 |
| hs132683125 | TGTACTTCCCTTTATTAAGCCGG | 5550 |
| hs132682696 | TACTGCTTTGGAGTATTGAAAGG | 5551 |
| hs132683197 | TCTATTATCAAGCATATCCTAGG | 5552 |
| hs132682198 | TTAAAAAGCACCTAGAGGATTGG | 5553 |
| hs132680825 | CTTTGTGGATATGTGACTAAAGG | 5554 |
| hs132680796 | CACAGAAAGTTGGAACCAAAGGG | 5555 |
| hs132679827 | TTCTGCTTATGTGTAAGCCTTGG | 5556 |
| hs132679841 | ACTTAGAGAGTATACATTGAAGG | 5557 |
| hs132680408 | TGCCTAGTCCCAATTTCTGGTGG | 5558 |
| hs132677049 | TCAAGGCAGTTACGGGTAAAGGG | 5559 |
| hs132682333 | TAGGATTAGCTTATCCCAAAGGG | 5560 |
| hs132678875 | GACTGCTCTGGGTTGTACTAAGG | 5561 |
| hs132677176 | ACATGAATCCCAAAGCCATCAGG | 5562 |
| hs132681168 | TGTTTTTTCTCCTAAATAGCAGG | 5563 |
| hs132682420 | TTTCCCTTCAAGAGAGGGAGTGG | 5564 |
| hs132677269 | CATGAATTCCTCCTTGGGCCAGG | 5565 |
| hs132682699 | TGAAAGGAGTTTTAGTATAGGGG | 5566 |
| hs132682953 | GAGACCACTCCAGAGAATATAGG | 5567 |
| hs132678948 | ATAATACAAGTCGAAAAAGTTGG | 5568 |
| hs132678908 | GTTGCTCCAAATTTTAACTTGGG | 5569 |
| hs132680043 | ACAAACAAATATAATGAAAACGG | 5570 |
| hs132680390 | TTTATTTCAAGAAAAAAAGCAGG | 5571 |
| hs132682369 | ATGATTTGCTTTCATCATGATGG | 5572 |
| hs132679458 | AGAAACCCAGCAAGCTGAAAGGG | 5573 |
| hs132683034 | GATCTATGTAAAACCTTCCATGG | 5574 |
| hs132679447 | AAATGAGTGAATACATAAAACGG | 5575 |
| hs132679329 | TTGCATCTCACTAGGCAAATGGG | 5576 |
| hs132683189 | TAGACACTTTTGAAGAAGATGGG | 5577 |
| hs132681679 | TTATGGGATAAAGAAACATATGG | 5578 |
| hs132680445 | CATACTAGATTAACTTGAAAGGG | 5579 |
| hs132678337 | TCATACACATTTTTAAAAGCAGG | 5580 |
| hs132679285 | GCTCTGCTGCATGGTAGAACAGG | 5581 |
| hs132680878 | TTTTATGAATTCAGAAGGACCGG | 5582 |
| hs132681615 | GAAAACATGTTATATGAGAATGG | 5583 |
| hs132677276 | CCACTCAGTTCACTTGATAAGGG | 5584 |
| hs132678483 | GATACAGTGCCAGGATTTGAAGG | 5585 |
| hs132680957 | ATATTTCTGAGGACTGGGGGTGG | 5586 |
| hs132677175 | GGGAAAGGTGAGAGAAGTCTTGG | 5587 |
| hs132679479 | ATCAAACTGTGAATTTAAAGTGG | 5588 |
| hs132680207 | TGTGAATCCCCAGCTCCAGCTGG | 5589 |
| hs132682598 | ATATTGCCACGGAAGAAGGCTGG | 5590 |
| hs132678266 | CTGGGCCTGCTGTATTCCCTGGG | 5591 |
| hs132682795 | CATTTGTTGTTTGTTTTCTGTGG | 5592 |
| hs132677461 | TTGCAACTGCTGTTTAAGCTGGG | 5593 |
| hs132681316 | TCATGGATCTACACAACCTCTGG | 5594 |
| hs132677105 | TGGGAGCTCTCACAAGCCTTGGG | 5595 |
| hs132678191 | GATTGTTTTCTTTACCTGCAGGG | 5596 |
| hs132681382 | GAGAGTGAGAACGAGGATGAGGG | 5597 |
| hs132677818 | AGCCAGGCGAGAGAGAAAACTGG | 5598 |
| hs132678126 | AGTTATTTATGAATACAAACAGG | 5599 |
| hs132681151 | ATTAAAGTCAGCTTTGCAAATGG | 5600 |
| hs132678144 | ACATCCAGATATTCAATAGTAGG | 5601 |
| hs132681933 | ATACCTGGAAGATATATAATGGG | 5602 |
| hs132678743 | CTCATTCCTACTTAATAGGATGG | 5603 |
| hs132677596 | ATCATTATCAGCTTGAAAAGTGG | 5604 |
| hs132681706 | ATTGTTTGCTACCAGGAGAAAGG | 5605 |
| hs132677912 | AGACAATGCTAGTTTTAGTAGGG | 5606 |
| hs132679597 | TCAGGTGTGATACTGTAAACAGG | 5607 |
| hs132677697 | CTTCAAGAGAGGATGACTATAGG | 5608 |
| hs132679565 | TTCTGGCCTTAAGTTCAAAAGGG | 5609 |
| hs132680830 | TTGCCTCTGCACCTTTACACTGG | 5610 |
| hs132679316 | TTTAAAATATCAACTACCTCAGG | 5611 |
| hs132681240 | GTATGCTAATTAAAATATACAGG | 5612 |
| hs132677394 | CATTTTACCAGGTATTCTAAAGG | 5613 |
| hs132681093 | GATGGTATATATATAATCCTTGG | 5614 |
| hs132677281 | TTTTAGGTCCTTTCGTGTTGTGG | 5615 |
| hs132680192 | ATGTACAAGCCCGAAAAGGCTGG | 5616 |
| hs132679683 | GACCCTTGCAATAGATAAGTTGG | 5617 |
| hs132678454 | CCAGCAAACACAGTGCTCAATGG | 5618 |
| hs132679105 | TGTATCATGCATACTAAAGATGG | 5619 |
| hs132680084 | TCTCTATGACACACTATACTAGG | 5620 |
| hs132682558 | CGCTGTTTCCCGAAATGCCAAGG | 5621 |
| hs132678199 | GATCAAGAATGGATGGAAACAGG | 5622 |
| hs132682281 | ACAAGTAGCAGGGTAGAATCAGG | 5623 |
| hs132682066 | AATTTACTAAGTTATTTGAATGG | 5624 |
| hs132679279 | GGCATGTTTGGTCTTGCAAAGGG | 5625 |
| hs132682534 | TTAGACCAACGCATTGTAGTTGG | 5626 |
| hs132677768 | CAGCTTTTAAAAGGAGGAGGGGG | 5627 |
| hs132680009 | TACTAAACACAGACAAATGATGG | 5628 |
| hs132679903 | CACAGAAATTAACTTCAATAGGG | 5629 |
| hs132677232 | AACATACTATTTCTCTTGGATGG | 5630 |
| hs132680722 | CTCACTGTCAATTTTGAGTGGGG | 5631 |
| hs132680569 | GTTAAGACATTATTAAAGTGTGG | 5632 |
| hs132680940 | GGAATAACAAATGAATCATAAGG | 5633 |
| hs132680860 | AGTGATCTCCCTAAGCATACAGG | 5634 |
| hs132678873 | TCTGGGTTGTACTAAGGAGTAGG | 5635 |
| hs132680521 | GGCATCACTAGGAATACAACAGG | 5636 |
| hs132679022 | AACACTAATCAAAAGCAAATCGG | 5637 |
| hs132677672 | TCTATCTCGTAAATAAGAGCTGG | 5638 |
| hs132679937 | ATTTTTCCAAATGACTAAGTAGG | 5639 |
| hs132683231 | AAAATGTTTGTCATAGAAAAGGG | 5640 |
| hs132679440 | AACACTAAACCAGTTTCAAAAGG | 5641 |
| hs132678442 | TGAGCATGTGTCTTAGCAAATGG | 5642 |
| hs132678779 | GCATCAGGCTGGTAGTTGCTAGG | 5643 |
| hs132680749 | TGTAGAGAAATAAGAGGAACCGG | 5644 |
| hs132680767 | TGGAGAAGCAAGAGAAGCTAAGG | 5645 |
| hs132681428 | TGCAGCTCCTCATATTTGATGGG | 5646 |
| hs132681910 | CCAAAATTCCATTGGAATGACGG | 5647 |
| hs132682924 | TGTCTATTGCCAAATGTAAAGGG | 5648 |
| hs132680987 | TGAGCCACTTTATTGTTGATGGG | 5649 |
| hs132680715 | ATTGCACTGCACATTGCCTTCGG | 5650 |
| hs132678968 | GCCAAAATAAAGGGGATGTCAGG | 5651 |
| hs132678583 | TGGAGTACAGTTCAAAAATAGGG | 5652 |
| hs132680277 | GCTGAAATGAGACACGTTGCCGG | 5653 |
| hs132682027 | TCCTAGTCTTGCAAATGCTAGGG | 5654 |
| hs132680138 | CTATTGTAGCCATATCAATAAGG | 5655 |
| hs132681988 | CCATCTACCCTGATTTTTGGAGG | 5656 |
| hs132682897 | TTTTGTGTTTCAGGGCAGATAGG | 5657 |
| hs132678441 | GCCTGGGTCTGACATAACTTTGG | 5658 |
| hs132682136 | AGGTTCTCCGGGAGTAAACTTGG | 5659 |
| hs132677113 | TGCTCTTTACATACACTCCTTGG | 5660 |
| hs132679758 | ATCCATCTAGTGTTTGATTGAGG | 5661 |
| hs132677960 | TTTTGGCTATAACCTCTAAAGGG | 5662 |
| hs132678375 | GTGTCCTTATAGCTTCTTGGTGG | 5663 |
| hs132679299 | TTTACGTTCAAATGTTGTAAAGG | 5664 |
| hs132682507 | TCATTTGCATCACTGCTGCTTGG | 5665 |
| hs132680137 | ACTGATCTATCAGCCAAAATCGG | 5666 |
| hs132680118 | CTATGTTACACTCAGTTAGCTGG | 5667 |
| hs132682892 | TTTCACTGCAATCCTTTCATGGG | 5668 |
| hs132680435 | TGTGAGGCCAGTTTGCTAAAGGG | 5669 |
| hs132678703 | ATAGATCAGCTGCTACACTATGG | 5670 |
| hs132681359 | GGTGATCTACAAGAGAAGTTGGG | 5671 |
| hs132677933 | AATAATTGCTAGAGGGAAAAGGG | 5672 |
| hs132679713 | TGATCAAAAAAGTATAAAACAGG | 5673 |
| hs132679354 | TTAAACTACATTGAATTCCCTGG | 5674 |
| hs132677957 | ATTCAGGTAAGTGCTTAATTGGG | 5675 |
| hs132678301 | ATAAGACACAGCATTTTCTCAGG | 5676 |
| hs132680535 | GAGAATCTATATTCTACATAGGG | 5677 |
| hs132679641 | TTGTATGGATTTTATCTGATGGG | 5678 |
| hs132679397 | GTTGTGCTTTGGTTTACCTTGGG | 5679 |
| hs132679209 | AATCATAGATTCTTTGCTAAGGG | 5680 |
| hs132682250 | TTAGGAAGCACCAGCCAGTTAGG | 5681 |
| hs132677758 | CATGTGTCCTGAGGACCTACAGG | 5682 |
| hs132682237 | GCTGACGCTGACACGGGCATTGG | 5683 |
| hs132682675 | TTGAAGACTCCCTTTTAAGTTGG | 5684 |
| hs132679006 | TATTATACTAAATTAAAAACAGG | 5685 |
| hs132679913 | CTTCAGTGTGTACAGTAATAGGG | 5686 |
| hs132682225 | TTTTGCCTGGATAATTCAAATGG | 5687 |
| hs132682844 | AACAGGGCCTTATGATTAAAGGG | 5688 |
| hs132679862 | GTATTTTGTACATGAGGAAAAGG | 5689 |
| hs132680116 | CTGAGTGTAACATAGAATATAGG | 5690 |
| hs132682531 | TTAAGAACAGACTGTTGGCCAGG | 5691 |
| hs132679864 | AATTATCAAACCCCATTATGAGG | 5692 |
| hs132683127 | ATCCATGCCGGCTTAATAAAGGG | 5693 |
| hs132680571 | CTTAACTAATCACATTGCTTGGG | 5694 |
| hs132682216 | CTGTTTCTAGAACTATATTGTGG | 5695 |
| hs132681815 | GACAAAGTTCCTTATTTGCTCGG | 5696 |
| hs132677136 | TGTTCCCTGCTTGAAGTACCCGG | 5697 |
| hs132682933 | CTGTGAAGCTCTAAAACAACAGG | 5698 |
| hs132683080 | ACATTTGGAAACTCTGTAAAGGG | 5699 |
| hs132678231 | TATTAAGAATATCATGAAAAGGG | 5700 |
| hs132682677 | CATTCATTGCCAACTTAAAAGGG | 5701 |
| hs132677158 | TTGTTTTTCAAATTGAATGAAGG | 5702 |
| hs132681578 | CAAGAATGAATGCATTTTGGAGG | 5703 |
| hs132679732 | TTTTCTTCATCACCAAATACAGG | 5704 |
| hs132677499 | AAAGTCTTCCATGTGAGATTCGG | 5705 |
| hs132681133 | ATCTCTGTATCTTCAGGCACTGG | 5706 |
| hs132677609 | TAGACTGTAATATCCAATATGGG | 5707 |
| hs132679804 | TGTACTATGTGCAATTAACTAGG | 5708 |
| hs132678956 | TCTACTAATCCATTGAACTAAGG | 5709 |
| hs132681376 | GTGATGCCAAAACAAACAACTGG | 5710 |
| hs132680808 | TTTAATCTGAAGAAATCCTTGGG | 5711 |
| hs132681508 | TATGTTCCTGGTTCAGGAAACGG | 5712 |
| hs132677730 | TGAATTGTATCTCTTCAGAAAGG | 5713 |
| hs132677065 | GAGTTATCCAGTATGAGAATAGG | 5714 |
| hs132678321 | TTATCTTTGATTTCGATTAGAGG | 5715 |
| hs132682908 | AAAAGGTCATTCCCCTTTGAGGG | 5716 |
| hs132683266 | AAATATGCTCTAAACTATAGTGG | 5717 |
| hs132681827 | CTTCAGTGGGTCAAATCCCATGG | 5718 |
| hs132680727 | CTAAAACCCCTCTTGGCCTTGGG | 5719 |
| hs132682805 | AATAATTTGAATTAAAAAAACGG | 5720 |
| hs132681477 | GCTTGACTTAGCTCTGTGATTGG | 5721 |
| hs132682722 | GTTCTGGCAGGGACTGAAGTTGG | 5722 |
| hs132677917 | TGACACTAATCTGTGCCAAATGG | 5723 |
| hs132681882 | TGATCTCCAACTCTGACAATGGG | 5724 |
| hs132679264 | ATACTGTTAAACACAAAATCAGG | 5725 |
| hs132677706 | TTAAAATGTTCAATGGTAGTTGG | 5726 |
| hs132679286 | GCTGCATATTATATTTTCCATGG | 5727 |
| hs132678847 | CAATTCTTCTTGCTAAGGCCTGG | 5728 |
| hs132683243 | TATGCCACTCTTAAAGCCTTGGG | 5729 |
| hs132682859 | CTTAGTTTGCACTCATCACCTGG | 5730 |
| hs132677995 | CTTTTCAAATTTTTACCAAAAGG | 5731 |
| hs132682044 | ATCTGCATTTAATCAACCCTGGG | 5732 |
| hs132679725 | TAGATAATCTACAGAACAAATGG | 5733 |
| hs132678296 | ATTTGTGCTTGTCATTAAGCTGG | 5734 |
| hs132677863 | CTGCTCTTTTCCCTTCTGTAGGG | 5735 |
| hs132678032 | TCTTTTCCAGTTCAACAGGCTGG | 5736 |
| hs132681839 | ATTATCTTTGAAGAACTCTTGGG | 5737 |
| hs132679523 | GTACTCTTGCTCTCAAGCTCTGG | 5738 |
| hs132682989 | CCCCCCTGCCTGCTTCTCATAGG | 5739 |
| hs132679398 | TGTTGTGCTTTGGTTTACCTTGG | 5740 |
| hs132681279 | CTCAAACCTGAGTAATAAACAGG | 5741 |
| hs132679300 | GAGATCCTGTATCGTCATATTGG | 5742 |
| hs132680971 | TTAATATCAGAGTTACCCTTAGG | 5743 |
| hs132682455 | TCTGTTACCATTACTGCTGTGGG | 5744 |
| hs132680281 | GATAGATGCACATCAACTTAAGG | 5745 |
| hs132681038 | CTTCTCAAGCTCCTTGTAAGTGG | 5746 |
| hs132681524 | CTACACTATAAGATAAATGTAGG | 5747 |
| hs132678819 | TTGGGCGTCAAGGTTGATAAGGG | 5748 |
| hs132682188 | TGTGCACACACAACACATTACGG | 5749 |
| hs132680786 | GCTTGCCAGTTTTTTTCAGTGGG | 5750 |
| hs132677473 | TTAGGAGCAATTTTATTGGCAGG | 5751 |
| hs132678015 | CTATGCCCTCCTCATCCTACTGG | 5752 |
| hs132682929 | GCATGAAGCATTAGTGGTGGTGG | 5753 |
| hs132681401 | TGAAGCCAAGATGAGGTAAAGGG | 5754 |
| hs132678625 | AGGAACCTCAAATCAGACTATGG | 5755 |
| hs132678476 | GATGAATTGTACATGAAATCAGG | 5756 |
| hs132680590 | TAAATTGCCATGGAAATCATAGG | 5757 |
| hs132682120 | CTTATACAGATGTAGAGCTTAGG | 5758 |
| hs132680329 | ATCTCTCCCCCTTAGACAACCGG | 5759 |
| hs132680793 | TGAACGATGGTGCTCCCCTTTGG | 5760 |
| hs132677442 | TTCTTCTTCCATGCCTGTAAGGG | 5761 |
| hs132677641 | TCATGTTTGTTTACCTGCAATGG | 5762 |
| hs132677420 | TTTCTTCTCTGCAATTTCCCTGG | 5763 |
| hs132677237 | AATTCTATAGAGTAAGTTGCAGG | 5764 |
| hs132677283 | TAGTATGAAATAAAGAAATACGG | 5765 |
| hs132677410 | TTAGCCTTCATTTCCATCACTGG | 5766 |
| hs132682118 | TTTCAGAATTAGTTGCCCTATGG | 5767 |
| hs132680056 | ATACACACAGGCAATCAATATGG | 5768 |
| hs132677536 | TATTTCTCATAAAAACTCCTAGG | 5769 |
| hs132680764 | CCTACCTTAGACTAGGCATATGG | 5770 |
| hs132679603 | GTAAATTTAATGATGTCTAAAGG | 5771 |
| hs132677182 | AAGACACAAGGACTACGTTTGGG | 5772 |
| hs132679958 | GTAACAAGATCTGAATGTTTGGG | 5773 |
| hs132683242 | CTATGCCACTCTTAAAGCCTTGG | 5774 |
| hs132682372 | TCTTCATTCTTTTCGTGTGAAGG | 5775 |
| hs132682830 | ATTTACAAGTTAACGTTCACTGG | 5776 |
| hs132677650 | CTTAAGTATGGGGAGGGCGGGGG | 5777 |
| hs132681018 | TCAATCTGAAATTTAACATAAGG | 5778 |
| hs132678089 | AATAGGCTGAAAGCTCCAACAGG | 5779 |
| hs132680938 | ACAAATGAATCATAAGGTAGAGG | 5780 |
| hs132680724 | CTCTCACTGTCAATTTTGAGTGG | 5781 |
| hs132682425 | ATGCTAATCCAAAATAATAAGGG | 5782 |
| hs132680045 | GTTTAAACAGAACAAGGAATTGG | 5783 |
| hs132677149 | GTGTTATGTTCTTTTTCCCATGG | 5784 |
| hs132680181 | TATTTGAATAAATATCATAAGGG | 5785 |
| hs132678928 | AGGAACAAGCACGATTTTAAGGG | 5786 |
| hs132678360 | ATATGTTGTTATACAGTCATTGG | 5787 |
| hs132682851 | CTACGGAGAGTACTTTTCATAGG | 5788 |
| hs132682207 | ACAGTTCACTGAAACTTAAAGGG | 5789 |
| hs132683213 | TGAGTTGTGATAAATGATAATGG | 5790 |
| hs132681049 | TTACATTCATTGTAACCTCTTGG | 5791 |
| hs132679339 | ATAAAAACAAAACAGTTAGATGG | 5792 |
| hs132678244 | GTCTTAGTATAGGGGACATTGGG | 5793 |
| hs132680421 | GTACATAGTCACTTTATAAGAGG | 5794 |
| hs132681149 | TAACTTAGAGATATAATAAGTGG | 5795 |
| hs132680414 | GTTTTATCCCACCAGAAATTGGG | 5796 |
| hs132683093 | CATTACATAATGACAAAAATGGG | 5797 |
| hs132678342 | AATGTAGAAGCGAAATTTGAGGG | 5798 |
| hs132678923 | GCTGTTATTCAGGTGCTTGAAGG | 5799 |
| hs132681880 | TTATAATTTACAAGTTCTTAGGG | 5800 |
| hs132682988 | GACAGTGAAGACTCAATAACAGG | 5801 |
| hs132682732 | TCCTGCCTATTAGGAAGAATGGG | 5802 |
| hs132679912 | AGTATCCACACACATTTCATTGG | 5803 |
| hs132680454 | AGTATGTTATCCTCAGGCTTTGG | 5804 |
| hs132679297 | TACAACATTTGAACGTAAAACGG | 5805 |
| hs132682723 | TCCTTTTGCTTGTTCTGGCAGGG | 5806 |
| hs132679270 | GTAGAGAGGGATTTGGGCTGAGG | 5807 |
| hs132677061 | GCTATGACCTATTCTCATACTGG | 5808 |
| hs132677474 | ATTGTAGGTCCCATTTGTAATGG | 5809 |
| hs132679692 | CAAAAAATAGAGAACCTTGTAGG | 5810 |
| hs132683223 | ATAACTTTCCTAAATATCCTAGG | 5811 |
| hs132683274 | CCCTCATATCTTCTTCTGCTGGG | 5812 |
| hs132679541 | TCTGTTTTTGATGTTGCAGATGG | 5813 |
| hs132682686 | CTTTTTCCATATCATTTCCTGGG | 5814 |
| hs132683060 | ATATATTGTCCCAACTGAACAGG | 5815 |
| hs132682601 | GGGATCCTGTACCCTGAGATAGG | 5816 |
| hs132678448 | AGGCACTTCAGCAGGATATAGGG | 5817 |
| hs132677070 | TTTGCTCAGGAATTATACTAAGG | 5818 |
| hs132678615 | GCTAACAATAAAATACTAATGGG | 5819 |
| hs132679179 | GGTGTAGTAGAGAGGAAGATAGG | 5820 |
| hs132677999 | GACTGCGGCAGACTGTTCTTGGG | 5821 |
| hs132679190 | AAGGTTTTGAGCAGAATAAAGGG | 5822 |
| hs132680936 | TGATTCATTTGTTATTCCTAGGG | 5823 |
| hs132678958 | TCTCCACTTTCCGCAGCAAATGG | 5824 |
| hs132679532 | GACAAGCAAGAGATAAATATCGG | 5825 |
| hs132677047 | GGCATGATCAAGGCAGTTACGGG | 5826 |
| hs132677898 | GGAGGGACTTTTTTTGGAGTTGG | 5827 |
| hs132680298 | CCTAATTTATTTCTGCGGCTTGG | 5828 |
| hs132677633 | AAGACACTGAAGAAAGAATAGGG | 5829 |
| hs132681909 | CCTTTTGTCCAAAATTCCATTGG | 5830 |
| hs132680532 | TTAAATCTAATACAGTCGTTTGG | 5831 |
| hs132677244 | TGTGGGAGTGCAAGTCAATAGGG | 5832 |
| hs132681368 | TGTATGACCTTTATACACTTTGG | 5833 |
| hs132683118 | AAAACCATCATATCACTCATTGG | 5834 |
| hs132678561 | CCAGGCATCACTGTTTATGATGG | 5835 |
| hs132680723 | TCTCACTGTCAATTTTGAGTGGG | 5836 |
| hs132682927 | AATTTTGCATGAAGCATTAGTGG | 5837 |
| hs132680606 | TGATAAAATGGGGATTTTAGTGG | 5838 |
| hs132680812 | TTCAGATTAAAATATTAAATGGG | 5839 |
| hs132678503 | TTAAGTTCAGATTCAAGAAAAGG | 5840 |
| hs132680905 | GCTGAATATTGCGACAATATAGG | 5841 |
| hs132679203 | ATAATTTCATAGTAATAAGTAGG | 5842 |
| hs132677171 | ACTGCTGTTTATTCAAAAAGAGG | 5843 |
| hs132680748 | GTTTGATGTAGAGAAATAAGAGG | 5844 |
| hs132679107 | TGTCAGCTCCTAGATCTTCCAGG | 5845 |
| hs132681242 | GCTGCTTTTGAGCTATTTGAAGG | 5846 |
| hs132677538 | TTACTGCTGAAATTGAATATGGG | 5847 |
| hs132677036 | TATAGCTTTAGTTTTCAAAAGGG | 5848 |
| hs132679002 | ATTCAGGCCTGAGATACATTTGG | 5849 |
| hs132678403 | TTTACTTCTTCCATTCAATTGGG | 5850 |
| hs132678707 | TTTTGTTTTGATTATTCGGTTGG | 5851 |
| hs132681859 | GATAAAGGCAGAAATAGAATTGG | 5852 |
| hs132677534 | GCAGTTGCTCCTGGACAGTATGG | 5853 |
| hs132678427 | AACCTTCTCTGTTGTGGTGGCGG | 5854 |
| hs132680783 | TGATCCCCACTGAAAAAAACTGG | 5855 |
| hs132678768 | CACCCAGTGCATGTTTTCATAGG | 5856 |
| hs132682063 | GATATAATAAAAACTATTGCAGG | 5857 |
| hs132681436 | CCTCCTCCACTCCAAATCTTAGG | 5858 |
| hs132682142 | GATGTTTTTGAAATAGGTTAAGG | 5859 |
| hs132677988 | CTTCTGGCTGTGAGAGGCATAGG | 5860 |
| hs132677097 | GCTGGACTCTAAGTTCTATAGGG | 5861 |
| hs132683229 | AGAATATCGTCTATTCTTTGTGG | 5862 |
| hs132680354 | GGTAATATTAGACGAGCAAAAGG | 5863 |
| hs132680307 | AGTCATCATCAAAAAACAATAGG | 5864 |
| hs132681250 | TAGTTCTTGCTATCATTAAGAGG | 5865 |
| hs132679846 | CTTTGGGGACCCCTGCTTTGGGG | 5866 |
| hs132681309 | GTATTGTATGAAAGCTTCATTGG | 5867 |
| hs132680125 | TTTTGCCTGCTTCTGTAAAGTGG | 5868 |
| hs132683277 | GACATATTCTAGCTACTTGATGG | 5869 |
| hs132678952 | CAAAATCCAGATAAGCCTTTGGG | 5870 |
| hs132677307 | TTTGGTGTTTCCAATGTCTAGGG | 5871 |
| hs132678009 | AGTCATGTGCCATATGTAAATGG | 5872 |
| hs132681605 | AAGTTATTTTTACTCCATAAGGG | 5873 |
| hs132680438 | ACAGAGATATGCTCAGTGTTAGG | 5874 |
| hs132680169 | CTATGGGGTAAAAATGCAATAGG | 5875 |
| hs132680485 | AATGATTTTGGGGCTCATAATGG | 5876 |
| hs132682941 | AGTAAACATATATCTCTGATAGG | 5877 |
| hs132681745 | TTAGAATTTGTTTTTACTGTGGG | 5878 |
| hs132682806 | GGTTTACTGACTTAGATGATAGG | 5879 |
| hs132680295 | GTCTTTATCTCAATGCCATTAGG | 5880 |
| hs132681065 | AGGACCTATGAGAGATACTTTGG | 5881 |
| hs132680241 | ACTTCTGGCTCCCTTCCCTCAGG | 5882 |
| hs132680437 | TGATAACCCCTTTAGCAAACTGG | 5883 |
| hs132679197 | GGTCATATGGTCCCAATATAGGG | 5884 |
| hs132680761 | AATTCCATATGCCTAGTCTAAGG | 5885 |
| hs132680228 | ACATGGTTTATGAAAGAAATGGG | 5886 |
| hs132681632 | AGATGTAGACGTTATCTATAGGG | 5887 |
| hs132682071 | TGCTTCCAGTTTAAAAAAAACGG | 5888 |
| hs132682693 | ATAAGCTAGACTATTAAGATTGG | 5889 |
| hs132678716 | GATAAATTCAGCTTATGTTAAGG | 5890 |
| hs132679219 | GAGGGACTGTACTAATTTGTAGG | 5891 |
| hs132681264 | AAAAGCATAGGACTACAAAATGG | 5892 |
| hs132681576 | ACCATCGCCATCATTGACTATGG | 5893 |
| hs132678309 | GCTAATCTGTTCAGAGTCATAGG | 5894 |
| hs132678251 | AGTTCCCACTAGGAAATAGTAGG | 5895 |
| hs132681502 | GGCAGTGCCTATTCACTAACTGG | 5896 |
| hs132678332 | TCATTTCTCTTCAAAGCCTTAGG | 5897 |
| hs132679755 | GTCCTCAATCAAACACTAGATGG | 5898 |
| hs132682680 | CACAGACCAGAAACAGAAATTGG | 5899 |
| hs132680416 | GTATATAAGGGAATCATTACAGG | 5900 |
| hs132677301 | CTGAAACGTATTGATCCCTTTGG | 5901 |
| hs132680741 | TTACATGGCATCCAGAGAACAGG | 5902 |
| hs132682082 | ACACATTACCAATTTTAAATGGG | 5903 |
| hs132680769 | TCATAATATTTAGTTGATAAGGG | 5904 |
| hs132679639 | GGTTGGTGATCTTTGTTGTATGG | 5905 |
| hs132682889 | GAAAGACTCTGTAGGTCAATTGG | 5906 |
| hs132678598 | CTAACAACATTAGAATCATTAGG | 5907 |
| hs132681816 | TGTCAATGTTTCCATACCTTGGG | 5908 |
| hs132682570 | TTTTTATATTTGTTGTTAGTGGG | 5909 |
| hs132677122 | TTTTAATCGTGGAAGTTTAAGGG | 5910 |
| hs132679724 | GTAAATAAAATATAACAAATCGG | 5911 |
| hs132677634 | GAAGACACTGAAGAAAGAATAGG | 5912 |
| hs132682867 | GCAGAGTATGGTTTTTAAAAGGG | 5913 |
| hs132680807 | TTTTAATCTGAAGAAATCCTTGG | 5914 |
| hs132682226 | TTTATGTCATTGGTTTTGCCTGG | 5915 |
| hs132679727 | GGAACCTAGGAAATAGGAATTGG | 5916 |
| hs132679596 | TTTCTACTCTAAATTGAGTCAGG | 5917 |
| hs132681299 | GATCTGGCTTAATAATATATAGG | 5918 |
| hs132680472 | ATAGATTTCTGGAGTAAAACAGG | 5919 |
| hs132683221 | ATAACCATCTTATAAATATTCGG | 5920 |
| hs132677379 | AATAGAGTAACATACATATTGGG | 5921 |
| hs132679988 | TAATGTAGCGAAGGGTACTATGG | 5922 |
| hs132683216 | GAAGATCTATTTCAACTTGCGGG | 5923 |
| hs132681930 | GCTGTTGTAAAGGAGATTACAGG | 5924 |
| hs132680572 | TCTTAACTAATCACATTGCTTGG | 5925 |
| hs132679637 | CTATTCAGAAGAAGAAAAAATGG | 5926 |
| hs132680420 | TTAGCATATTAACTCCTTTGAGG | 5927 |
| hs132679113 | GCTTTACATTATAAATTGTATGG | 5928 |
| hs132678710 | AATAAGTAGGCGAAACCATTTGG | 5929 |
| hs132677346 | TCCAGGTGATAACATTTAACAGG | 5930 |
| hs132682391 | TATTCTGTTCCTTAGCCTAAAGG | 5931 |
| hs132678030 | TTGTTTTGCTTTACTTTGGTAGG | 5932 |
| hs132680024 | GAACATTTATATCCCTAATAGGG | 5933 |
| hs132681214 | TCAATAGGATTTTCTCAGAATGG | 5934 |
| hs132679038 | CCAAAAGATGAAAATATGTTTGG | 5935 |
| hs132682904 | GCAAGTACTTGATTTAAATTGGG | 5936 |
| hs132678525 | TCTCTTTCTGCGAGGACCTATGG | 5937 |
| hs132681100 | TGACAGATATTGTGATTTAAGGG | 5938 |
| hs132681391 | AGAGAAGAGAGGAGTCCTATAGG | 5939 |
| hs132679303 | AGTCTGTCTTTAGCACTAACCGG | 5940 |
| hs132679831 | TTGAAAGGAATTCTGCAGATAGG | 5941 |
| hs132677651 | TCTTAAGTATGGGGAGGGCGGGG | 5942 |
| hs132681751 | GCTTACTGTCTACTTTTTCAGGG | 5943 |
| hs132678133 | AACTGTATGAAAGAGCCTATTGG | 5944 |
| hs132678439 | TGGAGTCTTGTTGCATTCCTGGG | 5945 |
| hs132683190 | TTAGACACTTTTGAAGAAGATGG | 5946 |
| hs132677314 | GACCAGCTCCCAGAAAAATAAGG | 5947 |
| hs132682707 | AGTAGAATAGAAAGATATATAGG | 5948 |
| hs132678559 | CACTGTTTATGATGGATTAAGGG | 5949 |
| hs132677733 | ATTCATTTTAAAACTCTTAGTGG | 5950 |
| hs132679101 | GGCTTCTTCTTTGGGCTGTAGGG | 5951 |
| hs132680370 | TCACAAAGTTTCCCAGAAACAGG | 5952 |
| hs132682735 | GTGTGCCCATTCTTCCTAATAGG | 5953 |
| hs132679828 | AGAGGGTGCAGAGAGCTAAAAGG | 5954 |
| hs132678183 | CCTCCTGCACACCAAAGTTTAGG | 5955 |
| hs132681481 | GCAGGGACAATGATGCAAATTGG | 5956 |
| hs132678905 | CTGCAAGACAAGCAAAATATAGG | 5957 |
| hs132677040 | CTTTTTTCATCCGTCATCTTCGG | 5958 |
| hs132680139 | AATGAGATTTTGTAACCATAAGG | 5959 |
| hs132678648 | CTGCTTTTCAGGAAGTAACTTGG | 5960 |
| hs132680577 | AGAATAGGATGGTTTGTAAAGGG | 5961 |
| hs132678087 | TTTTTTTTTAATCAGCCAATAGG | 5962 |
| hs132677600 | GCACCAATCTTTTAAAAAGTTGG | 5963 |
| hs132679916 | GTTCTTTCTTTGGGGATATGAGG | 5964 |
| hs132680711 | TTTCTCCTAAAACATCTTCCTGG | 5965 |
| hs132681381 | GGAGAGTGAGAACGAGGATGAGG | 5966 |
| hs132682322 | CTTCCTGAGCTTGAAATGAATGG | 5967 |
| hs132678855 | GCTGAGGTTGAGAGCTTTCAAGG | 5968 |
| hs132678931 | AGAAGTTCAAAACAAGGCTTTGG | 5969 |
| hs132678223 | AGGAAAATTCCAAAGTTAAAGGG | 5970 |
| hs132682213 | GAATAATCTTTCCAAATAAAGGG | 5971 |
| hs132678868 | CCTGATGCTTTTGCAATAAAGGG | 5972 |
| hs132681659 | AGCCACATATAGTTGACATTTGG | 5973 |
| hs132678085 | TACTGGTTCCTGAACTCAATTGG | 5974 |
| hs132681197 | CAGCTACAAGACAACCTTGTAGG | 5975 |
| hs132679746 | GCACTGACTCATGGTTTAAAGGG | 5976 |
| hs132677302 | ATGACCTTCTGATTACAAAAAGG | 5977 |
| hs132677583 | TAGGTACCTGACATTTCAATAGG | 5978 |
| hs132680078 | CTTTTAATCCAGATACTTAGTGG | 5979 |
| hs132677935 | GATGCAGAATCAGTCTTAAGAGG | 5980 |
| hs132682189 | TTAAAACAATGCCATTATAGTGG | 5981 |
| hs132678574 | TTCTTACCAAAGAAACAAAAAGG | 5982 |
| hs132678378 | CTGCCCACCAAGAAGCTATAAGG | 5983 |
| hs132680624 | TGATAGCTTTGATTTTCAATAGG | 5984 |
| hs132680304 | TGTAATGTCCTTAACTCTTAGGG | 5985 |
| hs132682051 | ATGCTTTGTGTGTTGTTGCTAGG | 5986 |
| hs132683133 | GAATTAATCTTATCTAGAAATGG | 5987 |
| hs132677459 | TACTTCTGTGTACTTTTTGTGGG | 5988 |
| hs132681571 | GTTTAAAACTGTAGTATAAAGGG | 5989 |
| hs132678916 | TTTATAGCCCTTTCTTTTGAGGG | 5990 |
| hs132678406 | TATTAATATTCCCAATTGAATGG | 5991 |
| hs132677243 | CTGTGGGAGTGCAAGTCAATAGG | 5992 |
| hs132679803 | AGGAGGCTAGCTAACATAATAGG | 5993 |
| hs132683048 | ATTGGCATACAGAGTGTAATAGG | 5994 |
| hs132683084 | GGTTGTCTCAGCACAACATTTGG | 5995 |
| hs132678037 | AGTGGTATGGTACCATAAAAAGG | 5996 |
| hs132678134 | ATAAATACTTAGTGTCCAATAGG | 5997 |
| hs132682762 | TATTAATTATTTGAATGCTTTGG | 5998 |
| hs132678379 | GGATATTAACATTTTTTAAAGGG | 5999 |
| hs132682763 | TGAATGAGAAAGGTATCATTTGG | 6000 |
| hs132678186 | CTCAATGTCTTCCTAAACTTTGG | 6001 |
| hs132679485 | ACTAAGGAAAACAGGCTATAGGG | 6002 |
| hs132682662 | TATAGTTTATAGGCTAATAATGG | 6003 |
| hs132683051 | CTACCTTCTTGGCATCAAACAGG | 6004 |
| hs132680066 | TTTGTTTCCTCTACTGCAAATGG | 6005 |
| hs132680515 | ATTCATTTCCCAAGGCTCATTGG | 6006 |
| hs132679871 | AATCATCCATGTAGGACAATAGG | 6007 |
| hs132683250 | GAGACATCAAATCTAGATAATGG | 6008 |
| hs132679753 | AAAGCAGTACATATGCAAAAAGG | 6009 |
| hs132679722 | TAAAAAATAAAAGAGCTAAAAGG | 6010 |
| hs132679199 | TTTCTTTGTGGAAGGTCATATGG | 6011 |
| hs132678966 | TAGTATTCTGCCAAAATAAAGGG | 6012 |
| hs132678031 | ATAATCTTTTCCAGTTCAACAGG | 6013 |
| hs132679271 | TATGAGGTAGAGAGGGATTTGGG | 6014 |
| hs132679432 | GTATTGTTCAATCATTTTGCAGG | 6015 |
| hs132679726 | CATTCCAATTCCTATTTCCTAGG | 6016 |
| hs132680726 | GCTAAAACCCCTCTTGGCCTTGG | 6017 |
| hs132678405 | AATTGAATGGAAGAAGTAAAAGG | 6018 |
| hs132683011 | GTGGCTTGCTCACAGTAAATAGG | 6019 |
| hs132682658 | TCACAGCTAGTAATGTAAAATGG | 6020 |
| hs132678881 | TTACACCCCTAGGGTATAATAGG | 6021 |
| hs132677703 | TAGCAACCTTTAAATTTAAAGGG | 6022 |
| hs132679705 | ATAGTCTTCTCAATTCTATCTGG | 6023 |
| hs132678955 | GTTAAGAAGCCTTAGTTCAATGG | 6024 |
| hs132681568 | CATTTTATAGCTTTATAGATAGG | 6025 |
| hs132678805 | GAATTACCCAAAAATATAAAAGG | 6026 |
| hs132682131 | ATTGCTATAGTTAAGAGTTTGGG | 6027 |
| hs132680734 | GCCTCCTCTTTGAATAAATCAGG | 6028 |
| hs132680424 | ATCAGAGTCCCGGTAGAAACTGG | 6029 |
| hs132681269 | GTTGTCTTGGATACATTAAATGG | 6030 |
| hs132682020 | TTTGTCTCTAAATAAGGTTTAGG | 6031 |
| hs132678339 | TGTTTTATAATTCTCCAATAGGG | 6032 |
| hs132683122 | TGTTTGAGAAAAAATTTTATGGG | 6033 |
| hs132682337 | CATGGAAGACTCAAGTTATACGG | 6034 |
| hs132679643 | TCATTTCCAGAAAGACAATATGG | 6035 |
| hs132677504 | TATAGTATCTGGAAGCAAATAGG | 6036 |
| hs132681323 | GGGCTCCTGACGCTTCTTGCAGG | 6037 |
| hs132680035 | TAACTGGTACGTCTCCTTATAGG | 6038 |
| hs132682049 | CAGTTTATCTTTCCAGTAAGAGG | 6039 |
| hs132677472 | ATAAAATTGCTCCTAATTGTAGG | 6040 |
| hs132678494 | GGGGCATCTCAGTCCTAAATTGG | 6041 |
| hs132683160 | TTTTAGAGCTTTCTTCATAAAGG | 6042 |
| hs132681592 | CTTTTTTCCTATTATTTACTGGG | 6043 |
| hs132677198 | GAGAGGGAGTAAAGGATTATAGG | 6044 |
| hs132681760 | CAGTCTCAGGACAAGTAGATAGG | 6045 |
| hs132680739 | TTACTCATCACCCTGTTCTCTGG | 6046 |
| hs132679245 | TCATTGAATTAATCACTAATAGG | 6047 |
| hs132681429 | TTGCAGCTCCTCATATTTGATGG | 6048 |
| hs132678274 | TCATTTCCTGCCTACCTGATTGG | 6049 |
| hs132682062 | TTTTTATTATATCTGCACTATGG | 6050 |
| hs132682342 | TCCATGAGAACCAAAACTATTGG | 6051 |
| hs132681185 | GGACTCTTCTCATCCAATTCCGG | 6052 |
| hs132679442 | GGAGCACAGCCTTTTGAAACTGG | 6053 |
| hs132678512 | ATTGTTGTCTGATTTATTACCGG | 6054 |
| hs132682388 | TGGCCCTACAGCTAAGAAAATGG | 6055 |
| hs132680242 | ATATCTCTAGTCTCTACTTCTGG | 6056 |
| hs132683188 | TGAAGAAGATGGGAATTTAGAGG | 6057 |
| hs132679332 | TCTGAAATCATATTTCGATTTGG | 6058 |
| hs132677075 | ATCTTACATGAGATACTTAGAGG | 6059 |
| hs132681967 | CTTGTACTATGAAGGATACTTGG | 6060 |
| hs132679335 | GTTTTGTTTTTATTCCAAATAGG | 6061 |
| hs132683082 | GCTGAGACAACCTACTTAAATGG | 6062 |
| hs132682163 | TTAATTGTTGAAACCTATAAAGG | 6063 |
| hs132679574 | GTATTATTCTTCCACATAATGGG | 6064 |
| hs132680392 | GCAGTGGCAGACTAGCTTTTGGG | 6065 |
| hs132682412 | TTGTCTCCTGAAATAATAATAGG | 6066 |
| hs132682925 | ATAGACATAGAGACCTAAAATGG | 6067 |
| hs132683245 | TCTTAAAGCCTTGGGTTTAAGGG | 6068 |
| hs132679553 | TCCCATGTCCCCCCAACTTTGGG | 6069 |
| hs132682963 | TCTTGACAATTCCTTTTAGAAGG | 6070 |
| hs132677728 | TTCAAGGTATGATCTTAAAAAGG | 6071 |
| hs132679854 | TTACTTTTGTAATTTAATAAGGG | 6072 |
| hs132682030 | ATAGCTCTTAGTAAATAGTATGG | 6073 |
| hs132682985 | CCAAAATGCAACCATTGTTTAGG | 6074 |
| hs132683212 | GCTTTGATTTCTATATTAACAGG | 6075 |
| hs132682023 | CTAGTGAGATGCTCATTAACTGG | 6076 |
| hs132678889 | CCTATAGATTAGAAAAAAATCGG | 6077 |
| hs132677252 | CCAGTTTTAGTAATTGTATAGGG | 6078 |
| hs132678080 | GGTCATGTCAAACTACTTACTGG | 6079 |
| hs132679221 | AATCAATCGGCCAAGCAAAATGG | 6080 |
| hs132680598 | TGTGTTCTCTAACTATGATTAGG | 6081 |
| hs132680073 | TTTGATATCCTCAGTAACTATGG | 6082 |
| hs132677096 | GCAAAGAAAATATTCCTAAAAGG | 6083 |
| hs132678248 | TCAAGACTAGTCTTAGTATAGGG | 6084 |
| hs132680299 | CCAAGCCGCAGAAATAAATTAGG | 6085 |
| hs132680965 | GGATTATATGAATAATGCTTTGG | 6086 |
| hs132680042 | TCTCAGACATTACAAACTTTAGG | 6087 |
| hs132680097 | GCCTGACTATCGTAAATTTAGGG | 6088 |
| hs132681394 | TATTTCCCAAATTATCCTATAGG | 6089 |
| hs132678965 | ATAGTATTCTGCCAAAATAAAGG | 6090 |
| hs132678957 | GGGAAGACTAATTAAAAAAATGG | 6091 |
| hs132681593 | GAAGAAACCCAGTAAATAATAGG | 6092 |
| hs132680333 | TTAGTATTACCGGTTGTCTAAGG | 6093 |
| hs132680816 | AATGTATTCTTAACAAGCTTTGG | 6094 |
| hs132683131 | GTATACACGAGGCTTTTTAAAGG | 6095 |
| hs132679869 | CTTTATCTATGCTTTGCTATAGG | 6096 |
| hs132681674 | TCTGTGCCTTGATTAAAAAAAGG | 6097 |
| hs132681888 | TTTCTGTTGCCAATTTATAATGG | 6098 |
| hs132683146 | GCTACGGAAGGGATATTTAAAGG | 6099 |
| hs132683234 | GATCTCCTAGTGGATTGTTTTGG | 6100 |
| hs132681807 | TTGCCCATCGTTATGTTTAGTGG | 6101 |
| hs132682450 | TTTTTGGTACGCTTTCAAACTGG | 6102 |
| hs132682906 | ATTGATTCTCAACTGGAAAAAGG | 6103 |
| hs132677039 | CGAAGATGACGGATGAAAAAAGG | 6104 |
| hs132682203 | TCTTATTTCAGTGAACTAAAAGG | 6105 |
| hs132681456 | AGTTTCCCCTTGCTGCTTCATGG | 6106 |
| hs132677453 | CATAAAGTTGGACCACTAAAAGG | 6107 |
| hs132677435 | GGTGGAGGATGGGAATAATTAGG | 6108 |
| hs132679355 | AATCATATGTAGTCATTCTATGG | 6109 |
| hs132678219 | ATATTTTTTCCCTTTAACTTTGG | 6110 |
| hs132678014 | GCAGAGGTTGTCTAACCTTTTGG | 6111 |
| hs132681475 | GATAGAGGTGAGAAAGGTTCTGG | 6112 |
| hs132681329 | GAATTATTAGACACAAAAATTGG | 6113 |
| hs132679845 | GACCTACCCCCTAAGCTTTAGGG | 6114 |
| hs132682839 | GGTTTAGCTCGCTAGCTAACAGG | 6115 |
| hs132678279 | CTAATTGTTGTTAAATTGATTGG | 6116 |
| hs132682627 | GTGCAAACAGTTATATTTAATGG | 6117 |
| hs132682025 | CTAGGGGATTAATATTAATAAGG | 6118 |
| hs132681517 | AATTAGATGATGAGACAAAATGG | 6119 |
| hs132677463 | GCTTGACTATCATCACATTCAGG | 6120 |
| hs132677133 | TGAAGTACCCGGGCATTTACAGG | 6121 |
| hs132680145 | TTACAAAATACAATTCCTTATGG | 6122 |
| hs132681972 | TTCCATTTAATGCTTACTAATGG | 6123 |
| hs132681122 | ACCTTACTATATACATATAATGG | 6124 |
| hs132682310 | CCTTCCAGAAATCACTAAAATGG | 6125 |
| hs132683035 | GGTTTTACATAGATCTAAAATGG | 6126 |
| hs132679030 | TCTATAGCAAATGAAAAAAAAGG | 6127 |
| hs132678091 | TGTTGGAGCTTTCAGCCTATTGG | 6128 |
| hs132677645 | TTAAGCCTGTTTACCATTGCAGG | 6129 |
| hs132681613 | ATTCTCATATAACATGTTTTCGG | 6130 |
| hs132678155 | AAAACTTGTCACTATCAAAATGG | 6131 |
| hs132679611 | ATATCTATTGAAGATATAATTGG | 6132 |
| hs132679293 | TGAAAAGTAGGCCAGAAATTTGG | 6133 |
| hs132679084 | GTGACCACTCGAACATTTACAGG | 6134 |
| hs132678359 | AATAAATTCATCTAATAAAAAGG | 6135 |
| hs132679024 | TTGTATATAAAAAGTTAAATAGG | 6136 |
| hs132682726 | CTACAATGTGACTTTCTAAATGG | 6137 |
| hs132681580 | CTCATTCTCCTACTACTCTTTGG | 6138 |
| hs132678179 | TCCATACTATACACATAATATGG | 6139 |
| hs132683173 | GTTTTTGGTTAATTGATAAATGG | 6140 |
| hs132677381 | TGTGCATTCGAACTTTAAATAGG | 6141 |
| hs132679191 | GCAGTAGTTGACATTAAAAATGG | 6142 |
| hs132682544 | CAGAATAGTTGGGAACTAAATGG | 6143 |
| hs132677612 | ACTTAAAGTTACATCAAAAATGG | 6144 |
| hs132677212 | TGAATATGACTAATAGAAATTGG | 6145 |
| hs132681658 | GGAAGAATTTGACAGAAATATGG | 6146 |
| hs132678208 | TGATTTCCTTGGGTTCCTTTTGG | 6147 |
| hs132681604 | GTTTTTTTCCCTGAAATTTTCGG | 6148 |
| hs132682383 | CTAATAAACTAAAGTCAAATTGG | 6149 |
| hs132679409 | CTTAGAGCTCTTTCAATTATGGG | 6150 |
| hs132681418 | ATTTAGATCTAATTTGTATAGGG | 6151 |
| hs132682951 | CTAGCAACTATCATGCTAATTGG | 6152 |
| hs132677793 | TATAATTGCCATCAAATAAAAGG | 6153 |
| hs132677773 | TTTAGGGGTCAGCTTTTAAAAGG | 6154 |
| hs132679778 | CTAAAAGGCATTTTTAAATATGG | 6155 |
| hs132677602 | TGAACCTTAAATTTAAATAATGG | 6156 |
| hs132683284 | AAGTTGTGAAATTTTCAAAATGG | 6157 |
| hs132679843 | GCTTTTATGTGTTTACTTAGAGG | 6158 |
| hs132677958 | TCTGAAAGTTAGCCCTTTAGAGG | 6159 |
| hs132681023 | GCGTTTTCTACTCTTAATAAAGG | 6160 |
| hs132680912 | CTGTATTCCATCAGAAAAAATGG | 6161 |
| hs132679886 | CTATTTGCTCAACATTATTCAGG | 6162 |
| hs132679851 | TTATTTTTCTGTCAGTAAAATGG | 6163 |
| hs132682054 | AGACACTTGAATATGAAAATTGG | 6164 |
| hs132680050 | CATACCTTCCTTTACGTTATGGG | 6165 |
| hs132680875 | TTTCTGGAATGACTGATCTTAGG | 6166 |
| hs132679004 | GCTTGCACAGAATTTTTAATTGG | 6167 |
| hs132680616 | GGTGATTGCATTGATATTAAAGG | 6168 |
| hs132677795 | ATTCCTTTCCTTTTATTTGATGG | 6169 |
| hs132678600 | GGACTGTTGTCATAAGTTATAGG | 6170 |
| hs132683003 | ATTTTTGTCCCAACAATAATAGG | 6171 |
| hs132677402 | TCAGAATGTTCAATTTTATAGGG | 6172 |
| hs132677265 | CTTGAAAAGGAAGCCATTAAAGG | 6173 |
| hs132680106 | GCATAACGTTTACATCAATATGG | 6174 |
| hs132679817 | TCTCCTTCATTGTAAATTTAGGG | 6175 |
| hs132678260 | ACCACTAAAGAAAATCTTTTCGG | 6176 |
| hs132683138 | GATAGGGCTTATTTTTAAAATGG | 6177 |
| hs132682079 | TCATAACACCCATTTAAAATTGG | 6178 |
| hs132680404 | ATTATGGCACAAAAACTATTTGG | 6179 |
| hs132677532 | TATTTTTGCATGCAAATAATTGG | 6180 |
| hs132679100 | GTTCAATATAACTCATTAAATGG | 6181 |
| hs132681534 | CTTATGCTGGTCAGATTAAATGG | 6182 |
| hs132683261 | TTACCTTGAAAACTAGTATTAGG | 6183 |
| hs132681887 | TTTTAATCTCCATTATAAATTGG | 6184 |
| hs132679717 | CTATTCAACTATAAAGTAAATGG | 6185 |
| hs132677155 | ATATCTAACCTGGAATAATTTGG | 6186 |
| hs132681720 | CCAAAAGTAAACTTAAAATTAGG | 6187 |
| hs132683203 | GTTAGAGGATGCAAATATTTTGG | 6188 |
| hs132678742 | CTTTCTCATTCCTACTTAATAGG | 6189 |
| hs132682053 | ATAAAATCAGTTTTTATTAAAGG | 6190 |
| hs132680340 | GATCCTTCCTTAGCTGTTAATGG | 6191 |
| hs132682465 | GTAATCAGACAACCTTAATTTGG | 6192 |
| hs132682665 | ATAACATGTTGTGTAATTATTGG | 6193 |
| hs132679340 | GATATTGGCCCTTTCTAAAAAGG | 6194 |
| hs132682811 | TGAAACATCGAATACAATTTTGG | 6195 |
| hs132682164 | TATAGGTTTCAACAATTAATTGG | 6196 |
| hs132681050 | TCTTTTTGTGGTAAGAAATATGG | 6197 |
| hs132678527 | CCTTAGACCTAGATTCTTAAAGG | 6198 |
| hs132678791 | AATCATTACCTCCAACTTAATGG | 6199 |
| hs132677774 | ATATGTGCTTTTGAGATAATTGG | 6200 |
| hs132677513 | TCATACTGTCCTAAGAAAAATGG | 6201 |
| hs132682306 | ATAGCAACCAAAATTCTTTCTGG | 6202 |
| hs132677010 | TGCCAAATGAAAATCATACGAGG | 6203 |
| hs132676914 | TCAGTCAGGGAAATGACCAGAGG | 6204 |
| hs132676992 | GATCAAGGTCTTACACTGGGGGG | 6205 |
| hs132676974 | TTAGCGTTAAGTGTTACAGGAGG | 6206 |
| hs132676981 | AGGGCAAAGATAAGAGACGAAGG | 6207 |
| hs132676896 | AATCACCAAACATTTACACATGG | 6208 |
| hs132676746 | GTAAACGAACAGAGCCTGTGAGG | 6209 |
| hs132676985 | TTATTTATGACTATAGACTGGGG | 6210 |
| hs132676819 | GGAACTACTTGAGAAAGACCAGG | 6211 |
| hs132676877 | TATCTTCTACTCCTAATGGGAGG | 6212 |
| hs132676913 | TAGATGGATTGACTCAGTCAGGG | 6213 |
| hs132677014 | TGACATCTAGTAGAATGACTAGG | 6214 |
| hs132676918 | AGACAACAGCCTCCTAACAGAGG | 6215 |
| hs132676901 | GCCAGTATAAGGTAAGCTAGTGG | 6216 |
| hs132676891 | TCTGTGATTAGGACAAACAATGG | 6217 |
| hs132676760 | TCATGCAGTAATCCCCAACTGGG | 6218 |
| hs132676860 | CCCCTATTAGAGTCTCCTTGGGG | 6219 |
| hs132676803 | TTAGGTGAGAACTTTGCAAGTGG | 6220 |
| hs132676868 | GTACCTTCCTTTTAACCCTGGGG | 6221 |
| hs132676861 | CCCCAAGGAGACTCTAATAGGGG | 6222 |
| hs132676919 | GACAACAGCCTCCTAACAGAGGG | 6223 |
| hs132676986 | TATTTATGACTATAGACTGGGGG | 6224 |
| hs132676970 | AATATATACCGAGAAAAGAGTGG | 6225 |
| hs132676940 | AATAATAACTTTAGTCAAGGGGG | 6226 |
| hs132676889 | AAGGCAAAATCCTCAGACCAGGG | 6227 |
| hs132676899 | TATAAGGTAAGCTAGTGGTAGGG | 6228 |
| hs132677009 | ATTTTTACTTTTTCTGCAGGCGG | 6229 |
| hs132676838 | TTCTTGGAGGAAAATCTAAGAGG | 6230 |
| hs132676750 | GCTAAAAACGTACCAGGCCAAGG | 6231 |
| hs132676996 | TGTTGATCAAGGTCTTACACTGG | 6232 |
| hs132676856 | GCAGTTTCTGATCCTGAAGTGGG | 6233 |
| hs132676967 | AGGTTTCTGGCAGACAGTTGGGG | 6234 |
| hs132676869 | CATCCCCAGGGTTAAAAGGAAGG | 6235 |
| hs132676958 | TGGGAGGGAAAAATTAGCAAAGG | 6236 |
| hs132676865 | AAAATAAGAAATACTCCCCAAGG | 6237 |
| hs132676833 | TTAATGTTTTGTGAAATCAAAGG | 6238 |
| hs132676991 | ATCAAGGTCTTACACTGGGGGGG | 6239 |
| hs132676989 | AAGACGATTATTTCAGTCAGGGG | 6240 |
| hs132676928 | ACGAACATTTGGAAGACACTGGG | 6241 |
| hs132676821 | GCAAATGATAAGGAGTTCTAGGG | 6242 |
| hs132676956 | GGCCTTCTGTGGAATTTGGGAGG | 6243 |
| hs132676752 | GTTTATGCTAAAAACGTACCAGG | 6244 |
| hs132676922 | TGTCCTGGCCCTCTGTTAGGAGG | 6245 |
| hs132676990 | TCAAGGTCTTACACTGGGGGGGG | 6246 |
| hs132676820 | TGATAAGGAGTTCTAGGGTGAGG | 6247 |
| hs132676754 | AAGTGTTGCCATTCTTAGAGTGG | 6248 |
| hs132676802 | ACTTTGCAAGTGGTTTGCATTGG | 6249 |
| hs132676790 | AATGGTGAGTGAGTGGAGAAGGG | 6250 |
| hs132676938 | TTATAGCTGAACTGTTTGCTGGG | 6251 |
| hs132676900 | GTATAAGGTAAGCTAGTGGTAGG | 6252 |
| hs132676816 | ATACTTTCCAGCAAAGCTCCTGG | 6253 |
| hs132676930 | TCTGTATTCGGTAACAAAGTAGG | 6254 |
| hs132676828 | AGTTACCTTGGAGAGTAAGATGG | 6255 |
| hs132676849 | GTGGCTTTGGTCTAACTACTAGG | 6256 |
| hs132676945 | ATGTGAGATTAATACTAAAACGG | 6257 |
| hs132676846 | CTATATATACACAAGAAGATTGG | 6258 |
| hs132676759 | TTCATTCTATAGCCCAGTTGGGG | 6259 |
| hs132676872 | TATTGGCTCAGGACATCCCCAGG | 6260 |
| hs132677000 | CCACATGTATAAACTCATACAGG | 6261 |
| hs132676773 | GCTCTAAACCTCAATCACTTTGG | 6262 |
| hs132676839 | CATCATTCTGACATTCTTGGAGG | 6263 |
| hs132676817 | GGAGCTTTGCTGGAAAGTATAGG | 6264 |
| hs132676851 | CATAATTGAAAGGAAATATGTGG | 6265 |
| hs132676853 | AATGTTTGAATATGATACAAAGG | 6266 |
| hs132676975 | CGTTAAGTGTTACAGGAGGCAGG | 6267 |
| hs132676948 | AGGACTTCAGAATTTAATTGAGG | 6268 |
| hs132676775 | TTAGGGAACCAAAGTGATTGAGG | 6269 |
| hs132676898 | CCTTATACTGGCCAATCTCATGG | 6270 |
| hs132676950 | CTTCAGAATTTAATTGAGGAGGG | 6271 |
| hs132676916 | GAAGTGATCACGCAGATACCTGG | 6272 |
| hs132676890 | GGGCTGACAGATCTGTGATTAGG | 6273 |
| hs132676942 | GAAATAATAACTTTAGTCAAGGG | 6274 |
| hs132676841 | TCCCACTTTCCACCAAAAAGAGG | 6275 |
| hs132676867 | AGTACCTTCCTTTTAACCCTGGG | 6276 |
| hs132676917 | TCTCCTGTGTTGCAATCCTCTGG | 6277 |
| hs132676744 | TTTCATTTCTAGTAGATTGTCGG | 6278 |
| hs132676784 | GCTAATAAGGGCTTGTAGTAAGG | 6279 |
| hs132676810 | GTAGTGCCCTGGACAAGGTCTGG | 6280 |
| hs132676785 | CTCTGGGCAATAGCTAATAAGGG | 6281 |
| hs132676876 | TAGTATACATGCCTCCCATTAGG | 6282 |
| hs132676886 | GGATCGGGAGCATTTGTTAGAGG | 6283 |
| hs132676932 | TGTAAATTGTTCACAGTCATAGG | 6284 |
| hs132676982 | ATGATTTAGCAGAATTTGATAGG | 6285 |
| hs132676879 | GATATATCTTCTACTCCTAATGG | 6286 |
| hs132676934 | TTTACATGATGACCTCAAATTGG | 6287 |
| hs132676863 | CTCCCCAAGGAGACTCTAATAGG | 6288 |
| hs132676870 | AGGACATCCCCAGGGTTAAAAGG | 6289 |
| hs132676921 | GCTGTTGTCTCTTCACTTCCAGG | 6290 |
| hs132676832 | TTTGATTTCACAAAACATTAAGG | 6291 |
| hs132676847 | TTGACAGTATACAAGTTTAATGG | 6292 |
| hs132676745 | CTTAATAGTGAAATTATAAATGG | 6293 |
| hs132676266 | AAGTTATATCTCATTCACAGGGG | 6294 |
| hs132676139 | AAAGCATTCAGATCACTAGGGGG | 6295 |
| hs132676427 | ATTTGATAGAGATTTAACTGTGG | 6296 |
| hs132676332 | TTGGAAATCCAGGTCCACAGTGG | 6297 |
| hs132676686 | ACAGGGGAAGAGTCACCAAGTGG | 6298 |
| hs132676685 | CCTCCAATGCCATGACACAGGGG | 6299 |
| hs132676568 | GCTTCATATTGCCTACCATGTGG | 6300 |
| hs132676471 | TGAGGAACAGGGTTAAACTGAGG | 6301 |
| hs132676650 | TGTAGCAGTGAAGAAAAGAGCGG | 6302 |
| hs132676220 | CATAGGACAAGAACTTAAGGGGG | 6303 |
| hs132676178 | ATGAAGACTCTAGAGGAGGGAGG | 6304 |
| hs132676403 | ATCAATTGTCTATCACAAGGTGG | 6305 |
| hs132676438 | TTACAAACAAAAGTGGGACAGGG | 6306 |
| hs132676209 | TATGTCAAAGCAAACCATGGAGG | 6307 |
| hs132676556 | ATATGTCATAAACTTGACAGTGG | 6308 |
| hs132676573 | TGTCAGAGATTACAGCCACATGG | 6309 |
| hs132676535 | TGTATAGTGAATGTATCACTTGG | 6310 |
| hs132676600 | TCTGAGCTAGAGCTTTAATGGGG | 6311 |
| hs132676477 | AGAGGGACAGGCTAAAATGGAGG | 6312 |
| hs132676173 | ATGTCTTCTTCAAACTACCAAGG | 6313 |
| hs132676460 | CTCTACAGATATAAGCTGAGTGG | 6314 |
| hs132676187 | CAGACCAGACCGTCAATGTGAGG | 6315 |
| hs132676129 | GTGTCTCACGGAAGCCCAAGGGG | 6316 |
| hs132676545 | TGGCCATTCCATAGGCTCAGGGG | 6317 |
| hs132676201 | ATTAAATAGTAGGGTCACTGTGG | 6318 |
| hs132676546 | CAGAGCTCAGTAGATCCACATGG | 6319 |
| hs132676097 | AGTGACAAGTCTTATGACAGTGG | 6320 |
| hs132676505 | TTATGAATGTGATCCAGACAAGG | 6321 |
| hs132676416 | AAATCATAAGAGGGAAGACGAGG | 6322 |
| hs132676265 | AAAGTTATATCTCATTCACAGGG | 6323 |
| hs132676229 | ACTCTACCTCCTAAATGACTGGG | 6324 |
| hs132676667 | ATAAGCTGAGCAACATTTGGGGG | 6325 |
| hs132676709 | TGAAGTAAAATCTGAAAACAGGG | 6326 |
| hs132676504 | TGAATGTGATCCAGACAAGGAGG | 6327 |
| hs132676198 | ACAACACTGATACACACAGTAGG | 6328 |
| hs132676175 | GATAACCATGAAGACTCTAGAGG | 6329 |
| hs132676527 | TTGTCTCCAGAAGAATAGGAAGG | 6330 |
| hs132676547 | TCTCCCCTGAGCCTATGGAATGG | 6331 |
| hs132676621 | AGATTTCTATATATGGCCCGTGG | 6332 |
| hs132676053 | TGGCACTCCTTGGAGCTAGGTGG | 6333 |
| hs132676318 | GTGTAAAAGCACATGCTGCAGGG | 6334 |
| hs132676551 | TCAAGTCTGAACTCTCAACAAGG | 6335 |
| hs132676525 | AGACACGCTGAGAGTCACTTCGG | 6336 |
| hs132676371 | AAAGCAAGAGGTATACTAAGGGG | 6337 |
| hs132676401 | GTAACTTCAAATCTACAATGTGG | 6338 |
| hs132676503 | GAATGTGATCCAGACAAGGAGGG | 6339 |
| hs132676651 | GATATTTCCAAAGAGTCCATCGG | 6340 |
| hs132676372 | AAGCAAGAGGTATACTAAGGGGG | 6341 |
| hs132676408 | ATAGTGTTGAAATATACCCTAGG | 6342 |
| hs132676326 | GATATATACAACCTAAACGGTGG | 6343 |
| hs132676495 | TGTGTGGACAAACTTATCACTGG | 6344 |
| hs132676126 | AGGTAGGCAACTGTGTCTCACGG | 6345 |
| hs132676415 | TAAGCAAGGAAATCATAAGAGGG | 6346 |
| hs132676593 | GGAACCTTTACCTTAGCCTGTGG | 6347 |
| hs132676492 | AAACCTATGAAAAGAAACCCTGG | 6348 |
| hs132676635 | GGGCTCCTCTAGCCCCAAAGGGG | 6349 |
| hs132676148 | GTATGCATAAGATATTGGCCAGG | 6350 |
| hs132676452 | GTGCAGTGATAACTTTATTGCGG | 6351 |
| hs132676335 | TGAAATACGGAGATAAGGAAGGG | 6352 |
| hs132676135 | GAATGAAGAAAAGTATCAGGTGG | 6353 |
| hs132676538 | GCCCTATGAAAGACACCATGTGG | 6354 |
| hs132676668 | GTTGCTCAGCTTATCTGGCAGGG | 6355 |
| hs132676443 | AGGTAAAGCAAATCCCAGCTAGG | 6356 |
| hs132676515 | GTATAAAACTACATTTGTGAAGG | 6357 |
| hs132676050 | AGTACTTCCACCTAGCTCCAAGG | 6358 |
| hs132676035 | AATCAACCTGTTAAAGAAAGGGG | 6359 |
| hs132676426 | AATACATCTTGGGGAGCGGGGGG | 6360 |
| hs132676672 | TCTTAAAATAACCATAAGCAGGG | 6361 |
| hs132676253 | AAATAAGACGTCAGAATGAGGGG | 6362 |
| hs132676197 | TGTGACAAGCACTCTATGGTTGG | 6363 |
| hs132676448 | TGGGAGACTATGCTACTAAGTGG | 6364 |
| hs132676695 | CAGTCACAGCTAAACCAAGTAGG | 6365 |
| hs132676327 | ATATATACAACCTAAACGGTGGG | 6366 |
| hs132676465 | ACAGGTTAAACGCCAGGACAGGG | 6367 |
| hs132676146 | AGGGACAGAATTGTATTCAGTGG | 6368 |
| hs132676154 | ATTGTTTCTAGGAAGGCAGGTGG | 6369 |
| hs132676080 | AAACATACTCACTCATACTGCGG | 6370 |
| hs132676232 | TCATAGCCCAGTCATTTAGGAGG | 6371 |
| hs132676693 | AAACCAAGTAGGCAGGTCAGAGG | 6372 |
| hs132676594 | TTCTGCATGAGAATGTCTTGAGG | 6373 |
| hs132676207 | TGGAGGATAGAAAACCTCCATGG | 6374 |
| hs132676113 | TGAACTTTTTGACACTGGGGGGG | 6375 |
| hs132676241 | CTTGAATAAAATATTGACGATGG | 6376 |
| hs132676128 | TGTGTCTCACGGAAGCCCAAGGG | 6377 |
| hs132676222 | ACTAGTCTGGCGATAGAAGAGGG | 6378 |
| hs132676344 | TATTCTTAACATTCTATGCGTGG | 6379 |
| hs132676210 | CATTATGTCAAAGCAAACCATGG | 6380 |
| hs132676058 | GTTAGGTCTCTAATAAACAATGG | 6381 |
| hs132676190 | AGAGAAGTTACTGTATGGCAGGG | 6382 |
| hs132676555 | TTGAGAGTACAAATAACTGTAGG | 6383 |
| hs132676512 | AAACCCATGAGAAATGGCTCAGG | 6384 |
| hs132676707 | ACAAAGTCCTGCAGTCAACTCGG | 6385 |
| hs132676238 | CCATGTTCCTGAAGGAAAGTGGG | 6386 |
| hs132676200 | TGGTTGGAAATTAAATAGTAGGG | 6387 |
| hs132676219 | GCATAGGACAAGAACTTAAGGGG | 6388 |
| hs132676073 | GATTCCTCATATGGCAGTAGAGG | 6389 |
| hs132676221 | ATGCCTTTAAAATAGACAGCAGG | 6390 |
| hs132676069 | CACTCCTCAAATGTTTAAGGTGG | 6391 |
| hs132676137 | AGAAAGCATTCAGATCACTAGGG | 6392 |
| hs132676625 | TTAAAACCTCCGAAACTCCACGG | 6393 |
| hs132676714 | TGTCTTTTCCCTTCCCTCTGTGG | 6394 |
| hs132676078 | ATCAATAGATAAATTCATAGTGG | 6395 |
| hs132676059 | TAACATTCATTCTAAAACAGAGG | 6396 |
| hs132676629 | ACTGATTATGTCTAGCCTTGTGG | 6397 |
| hs132676606 | ATAATGGCTTAAATTTGAGAAGG | 6398 |
| hs132676466 | TTAAACGCCAGGACAGGGAAAGG | 6399 |
| hs132676567 | GGGGTGAGAAGAAGAAAGCATGG | 6400 |
| hs132676678 | AAGTGCCTGGTGAAATGTATTGG | 6401 |
| hs132676094 | GTCTTATGACAGTGGATAAGGGG | 6402 |
| hs132676623 | TATGGCCCGTGGAGTTTCGGAGG | 6403 |
| hs132676076 | ATAGTGGCTTTTCCTTATGGAGG | 6404 |
| hs132676570 | CTGTAATCTCTGACACACAAAGG | 6405 |
| hs132676366 | CCTATTATGTTCACATATGGAGG | 6406 |
| hs132676597 | GGTTTTGTCCTCTAACGCATAGG | 6407 |
| hs132676624 | TAAAACCTCCGAAACTCCACGGG | 6408 |
| hs132676359 | GACTTGAGCTTAAAAAGTTGGGG | 6409 |
| hs132676430 | TTAGAACTTAGTTATATCCAAGG | 6410 |
| hs132676534 | AGTGAAGTAGGAGTGGAAAACGG | 6411 |
| hs132676674 | AGTTTATCTTTGAAAGAGAGAGG | 6412 |
| hs132676283 | GTATTTTACACTGCATATGAGGG | 6413 |
| hs132676181 | GGTATTTGTCATGCCTGAAAGGG | 6414 |
| hs132676691 | CTAATCTCCTCTGAACCACTTGG | 6415 |
| hs132676062 | CTAGACAGAGATAAGAGAGCTGG | 6416 |
| hs132676425 | TAATACATCTTGGGGAGCGGGGG | 6417 |
| hs132676162 | ATATAATCACATTTTGCAAGTGG | 6418 |
| hs132676530 | CGTGGTTTCTGGCTAATTTGGGG | 6419 |
| hs132676081 | AACATACTCACTCATACTGCGGG | 6420 |
| hs132676627 | CCTGTTGACAATCAGCGAAACGG | 6421 |
| hs132676500 | GTATGCAGTTTAAAAATGGAAGG | 6422 |
| hs132676288 | TTTTAAAATTAGCTAAGGGAGGG | 6423 |
| hs132676571 | TGTAATCTCTGACACACAAAGGG | 6424 |
| hs132676488 | TGAGTGATTTTTTTAAACCAGGG | 6425 |
| hs132676583 | ATAAATCAAAATGCTCAAGCAGG | 6426 |
| hs132676150 | CTGTTATTATAACAATTCACAGG | 6427 |
| hs132676374 | AGAGGTATACTAAGGGGGATGGG | 6428 |
| hs132676596 | TCTCATGCAGAAACCAAACTTGG | 6429 |
| hs132676590 | TCAGCCACAGGCTAAGGTAAAGG | 6430 |
| hs132676239 | TCCATGTTCCTGAAGGAAAGTGG | 6431 |
| hs132676510 | CAGCCTGAGCCATTTCTCATGGG | 6432 |
| hs132676719 | GCAAATGCATGCTGCCACAGAGG | 6433 |
| hs132676381 | TATTTTACAGGCCTATTGTGTGG | 6434 |
| hs132676716 | GCATGCTGCCACAGAGGGAAGGG | 6435 |
| hs132676424 | ATAATACATCTTGGGGAGCGGGG | 6436 |
| hs132676688 | AGAGTCACCAAGTGGTTCAGAGG | 6437 |
| hs132676677 | TTAGGGAGCTACTAAGTGCCTGG | 6438 |
| hs132676093 | AGACTTGTCACTGTGTAAGCAGG | 6439 |
| hs132676703 | AGACAGCGTTTAATAAGTGTTGG | 6440 |
| hs132676613 | TATATTTTCTGTAAGAAATGTGG | 6441 |
| hs132676684 | GCCTCCAATGCCATGACACAGGG | 6442 |
| hs132676250 | GAAAGAAGAATAGCAGACTAGGG | 6443 |
| hs132676611 | AACCTCCTAATGTTTTAGTAGGG | 6444 |
| hs132676046 | TAGATTACTGCAGATTAAAGAGG | 6445 |
| hs132676458 | CCAATTTGCATTCTTTGTGGTGG | 6446 |
| hs132676324 | TCAATACATGCATCTCTCAATGG | 6447 |
| hs132676484 | AATATTCCTTTAAAAATCAGAGG | 6448 |
| hs132676290 | TTAAAATTAGCTAAGGGAGGGGG | 6449 |
| hs132676192 | ATAAAAGAGAAGTTACTGTATGG | 6450 |
| hs132676553 | CTTGCACATCCAACTTCATAGGG | 6451 |
| hs132676608 | TTCCCTACTAAAACATTAGGAGG | 6452 |
| hs132676417 | GGAAGACGAGGACACAAGCTTGG | 6453 |
| hs132676491 | CATAGGTTTATAGAATTAGGAGG | 6454 |
| hs132676109 | AGCCCAGTACCTGAATATAGTGG | 6455 |
| hs132676368 | CTAATTTCCCTTAAAGCAAGAGG | 6456 |
| hs132676244 | CTTTTACTGTAAACCATCATGGG | 6457 |
| hs132676206 | TTATTCAAATGTAATTTTGGAGG | 6458 |
| hs132676251 | GTAAATAAGACGTCAGAATGAGG | 6459 |
| hs132676589 | TATTGTTCAGCCACAGGCTAAGG | 6460 |
| hs132676706 | GCAGTGTTTTGTGCAACAAACGG | 6461 |
| hs132676297 | AAACTTTTAAGGATATTTCAGGG | 6462 |
| hs132676615 | ATGTCATATGAATCTCTTCAGGG | 6463 |
| hs132676669 | TGTTGCTCAGCTTATCTGGCAGG | 6464 |
| hs132676682 | AGGATGTTAATAAGAAAGGAAGG | 6465 |
| hs132676052 | TTGGAGCTAGGTGGAAGTACTGG | 6466 |
| hs132676497 | GAGATATAGAAACCAAAAACGGG | 6467 |
| hs132676226 | ATTAATATATAATCATTTCAGGG | 6468 |
| hs132676387 | GCATATAATGTTAGATAAAGAGG | 6469 |
| hs132676196 | GTGTTGTGACAAGCACTCTATGG | 6470 |
| hs132676414 | GTAAGCAAGGAAATCATAAGAGG | 6471 |
| hs132676542 | CTGAGCTCTGGCCATTCCATAGG | 6472 |
| hs132676369 | TTAAAGCAAGAGGTATACTAAGG | 6473 |
| hs132676445 | TTTTATTTACAAGTTTTTGAAGG | 6474 |
| hs132676715 | AGACATAGACCTGACCTGATAGG | 6475 |
| hs132676087 | GTTGCCATGGACCTGACTCTGGG | 6476 |
| hs132676263 | AAGCATTTGCGGTTTTAACTTGG | 6477 |
| hs132676034 | AAATCAACCTGTTAAAGAAAGGG | 6478 |
| hs132676184 | TCTTCAATGCCTCACATTGACGG | 6479 |
| hs132676394 | GGCTTTTTAAATACTCACCTTGG | 6480 |
| hs132676642 | GTACCGCATTTTCTTTATGCAGG | 6481 |
| hs132676498 | TGAGATATAGAAACCAAAAACGG | 6482 |
| hs132676578 | AATTTCCTTTTAAAATTCACAGG | 6483 |
| hs132676037 | GAAAGGGGTAAAACATTTGAAGG | 6484 |
| hs132676554 | AATAAATCTCCCTATGAAGTTGG | 6485 |
| hs132676533 | GGAGTGGAAAACGGTATAATCGG | 6486 |
| hs132676631 | TTATGTCTAGCCTTGTGGTTGGG | 6487 |
| hs132676055 | TTAATTATAATGGCACTCCTTGG | 6488 |
| hs132676698 | ATTTTTACTTGGGGTATGAATGG | 6489 |
| hs132676513 | ATATGAAAACCCATGAGAAATGG | 6490 |
| hs132676303 | CATAATAATTTTCAATGCATGGG | 6491 |
| hs132676140 | CTAGGGGGTAATTAACTGATTGG | 6492 |
| hs132676108 | ACTGGGCTCAGACCTGATAAAGG | 6493 |
| hs132676518 | TTATAATTTGTGTATGTGGCAGG | 6494 |
| hs132676581 | TTTTTTCTAAAGTTGAGCTTGGG | 6495 |
| hs132676628 | CCGTTTCGCTGATTGTCAACAGG | 6496 |
| hs132676634 | TGGGCTCCTCTAGCCCCAAAGGG | 6497 |
| hs132676526 | CTGGTTGTCTCCAGAAGAATAGG | 6498 |
| hs132676453 | AGTACTTTCTTCTCAATAAGTGG | 6499 |
| hs132676357 | TTAAAAAGTTGGGGCTATATGGG | 6500 |
| hs132676390 | CAGTGACTATTTTCAATGATGGG | 6501 |
| hs132676392 | AGTCACTGAATTAGATTGAATGG | 6502 |
| hs132676681 | TTTTAGGATGTTAATAAGAAAGG | 6503 |
| hs132676520 | CCACATACACAAATTATAAACGG | 6504 |
| hs132676089 | GGAGACTTAGATCAAGTAATAGG | 6505 |
| hs132676347 | TGATCACTCTGATACATTGCAGG | 6506 |
| hs132676559 | AATCCATGAAGAAAAATTGATGG | 6507 |
| hs132676056 | GCAGTCAGCCTTAATTATAATGG | 6508 |
| hs132676721 | GATTGTGGCTAATATAATTCAGG | 6509 |
| hs132676167 | TCTCCACAAAAAGCTTTAAGAGG | 6510 |
| hs132676622 | ATATATGGCCCGTGGAGTTTCGG | 6511 |
| hs132676189 | CAGGGTGATGATTATTTAAGAGG | 6512 |
| hs132676130 | AAGCCCAAGGGGTAAGAAAAAGG | 6513 |
| hs132676276 | TGCTTTAGTCTAATTTCAATTGG | 6514 |
| hs132676179 | TCCCTCCTCTAGAGTCTTCATGG | 6515 |
| hs132676665 | AGATAAGCTGAGCAACATTTGGG | 6516 |
| hs132676057 | TCTGTTTTAGAATGAATGTTAGG | 6517 |
| hs132676661 | GAAACTGTGCAGCAATTAATTGG | 6518 |
| hs132676552 | TCTTGCACATCCAACTTCATAGG | 6519 |
| hs132676362 | CCTCCATATGTGAACATAATAGG | 6520 |
| hs132676380 | ATAAAGTGCAAATATTTTACAGG | 6521 |
| hs132676038 | GTTTTACCCCTTTCTTTAACAGG | 6522 |
| hs132676235 | CTTTTATCCCACTTTCCTTCAGG | 6523 |
| hs132676306 | ATGTACTTCCACCATCTATTTGG | 6524 |
| hs132676587 | GTCATAAGTATAAACAAAAATGG | 6525 |
| hs132676574 | ATATACCTGTGAATTTTAAAAGG | 6526 |
| hs132676195 | CACTTCACACAGATTTTAAAAGG | 6527 |
| hs132676142 | CTAGTGATCTGAATGCTTTCTGG | 6528 |
| hs132676522 | CTTCGTCGTAAACTTGTTAAAGG | 6529 |
| hs132676386 | TTAAGTTTCTGAATACTTAAAGG | 6530 |
| hs132675817 | AAGTAGAAGCAATAACAGCGAGG | 6531 |
| hs132675963 | TAAGTGGGAGAATATCTGCAAGG | 6532 |
| hs132675764 | AAGTAATGAAAATAGAACCAAGG | 6533 |
| hs132675934 | CTACTTCACAACAGTAAGCGGGG | 6534 |
| hs132675834 | TTTAGAGACAGTGAGACCTGAGG | 6535 |
| hs132675941 | TTTGGAATAAAAATATATGGGGG | 6536 |
| hs132675797 | TTATGTACAGTGACTGCAGGAGG | 6537 |
| hs132675916 | AAGCAGTTTGGGGAGAGATGCGG | 6538 |
| hs132675880 | TAGATCTATCAGATAACGAGCGG | 6539 |
| hs132675849 | TTGGTAGGCAGGAATTTACAGGG | 6540 |
| hs132675859 | ATAACAAATCTTGCTAACAGTGG | 6541 |
| hs132675871 | GTTCAATGAGAAGTCCTCCATGG | 6542 |
| hs132675898 | AAAACAACAGGCTATAAGAGAGG | 6543 |
| hs132675986 | TAGTGGATATAAGTTCATGTTGG | 6544 |
| hs132675777 | TGAACCTTAACCTTCCCAGAAGG | 6545 |
| hs132675831 | GGTCTCACTGTCTCTAAAGGAGG | 6546 |
| hs132675977 | TGCCACTAAGATGGTAACCGTGG | 6547 |
| hs132675755 | ATAAAGAAAAAAAACAACAAAGG | 6548 |
| hs132675804 | AGCAGATAGTGGCTTAATGGTGG | 6549 |
| hs132675845 | TGTCTTGCACAGAAGTGACTTGG | 6550 |
| hs132675876 | CTATGTTATTAATAGTGCCATGG | 6551 |
| hs132675833 | GAGACAGTGAGACCTGAGGACGG | 6552 |
| hs132675931 | ACAACAGTAAGCGGGGAGAGGGG | 6553 |
| hs132675811 | TTTAACGTTATGCACATAGAGGG | 6554 |
| hs132675877 | GTATGTTGCATTAGAAAAAGGGG | 6555 |
| hs132675841 | CAGAGGAATAGAAATGAAGAGGG | 6556 |
| hs132675982 | ACGTATATATATACAATGAGTGG | 6557 |
| hs132675889 | TGCTTAATAGTTTTAGAACAGGG | 6558 |
| hs132675989 | GCAGAGGTCAAATAGACAGTCGG | 6559 |
| hs132675832 | AGACAGTGAGACCTGAGGACGGG | 6560 |
| hs132675896 | TCAAGGATATGGTGATTCAAGGG | 6561 |
| hs132675795 | GAGTAACTGACTAAATAAGTAGG | 6562 |
| hs132676020 | ACATTTGTTTCACACGTCAAGGG | 6563 |
| hs132675927 | GGCAACAAAGAATAGCTCATAGG | 6564 |
| hs132675802 | TTCCAACCGTAATTTAGCACAGG | 6565 |
| hs132675800 | GTCCTGTGCTAAATTACGGTTGG | 6566 |
| hs132675824 | ATCATTGAGCTGGTCCCCAAAGG | 6567 |
| hs132675964 | ATTTCTTATCACGATTAAGTGGG | 6568 |
| hs132675900 | GTGGAGGCGCTTTTGCAATGAGG | 6569 |
| hs132676018 | AAAAGCAGCACTATGGAGCAGGG | 6570 |
| hs132675930 | GGAGAGGGGAAGAGAAAGAGCGG | 6571 |
| hs132675984 | ATGTATATGTATACAATGAGTGG | 6572 |
| hs132676012 | CCTTAACATTTCAGACGACATGG | 6573 |
| hs132675972 | ACCATGGCCCAGAACAGGGGTGG | 6574 |
| hs132675728 | TTACATTTTTGACCTACATGTGG | 6575 |
| hs132675936 | TGCTACTTCACAACAGTAAGCGG | 6576 |
| hs132675738 | GAAGTTAAGTCTATTCTCAAAGG | 6577 |
| hs132675971 | GGGACCATGGCCCAGAACAGGGG | 6578 |
| hs132675892 | GAGATAAGTAAGCAGAGGCTGGG | 6579 |
| hs132675919 | GACACCATCACTATATGGAACGG | 6580 |
| hs132675787 | CTAAGCCTATTATTTAGGAGTGG | 6581 |
| hs132675935 | GCTACTTCACAACAGTAAGCGGG | 6582 |
| hs132675929 | GAGAGGGGAAGAGAAAGAGCGGG | 6583 |
| hs132676005 | TTTATTTTAATCACTACCAAAGG | 6584 |
| hs132675858 | GATTTGTTATTACAACCAGCTGG | 6585 |
| hs132675766 | CTATGAGACAATCAAATACATGG | 6586 |
| hs132675860 | ACTTGGCTCTGGCAACCAGCTGG | 6587 |
| hs132675788 | ATAATAGGCTTAGTTATCAAGGG | 6588 |
| hs132675924 | CAGCCCGTTCCATATAGTGATGG | 6589 |
| hs132675970 | AGGGACCATGGCCCAGAACAGGG | 6590 |
| hs132675961 | TGATACACCTCAAATAAAAGTGG | 6591 |
| hs132676004 | TAATCACTACCAAAGGAATGAGG | 6592 |
| hs132675854 | ACTTTTACTGGACAATTCAAGGG | 6593 |
| hs132675872 | CATTGAACTTGTGAAAACTCAGG | 6594 |
| hs132675947 | TTTTAATGAACGTGGTGGGGGGG | 6595 |
| hs132675917 | AGATGCGGTATGTTGCTTGCTGG | 6596 |
| hs132675974 | TATACCAAATGCCACTAAGATGG | 6597 |
| hs132675882 | TAATCTTTGCTGAAATTCAAGGG | 6598 |
| hs132675905 | TGGACTAGTTCAGATGGAGTTGG | 6599 |
| hs132675816 | AAGCAATAACAGCGAGGCTGAGG | 6600 |
| hs132675807 | TGAATCACATTCATCATTGGAGG | 6601 |
| hs132675956 | TGACTGCTGTTTTTACTGGTCGG | 6602 |
| hs132675783 | AATAAAAAGATGACTAACATTGG | 6603 |
| hs132675830 | TCAGGTCTCACTGTCTCTAAAGG | 6604 |
| hs132675995 | TTTTTAAGTCACCTGAGCATAGG | 6605 |
| hs132675794 | ACTAAATAAGTAGGTCAAGAAGG | 6606 |
| hs132675754 | ATATAGCTTGCGTTAAATGATGG | 6607 |
| hs132675981 | AACTTGAATTTAAACTTCCACGG | 6608 |
| hs132675759 | AGGAAATATTTATCCCTAAGAGG | 6609 |
| hs132675842 | GGAATAGAAATGAAGAGGGTAGG | 6610 |
| hs132675967 | TTTACTCTTTTGATAGTGAAGGG | 6611 |
| hs132675999 | ATAAAAGATTAGTAGAATATGGG | 6612 |
| hs132675949 | AGCCTCTCAAACTATTTTGAGGG | 6613 |
| hs132675979 | TTCCACGGTTACCATCTTAGTGG | 6614 |
| hs132675920 | ACACCATCACTATATGGAACGGG | 6615 |
| hs132675983 | CAATGAGTGGAAAATATTAGTGG | 6616 |
| hs132675911 | GCATGCTTGAGTTCTTCTGCTGG | 6617 |
| hs132675743 | CTTGTTCATTGAAAGCTAGAAGG | 6618 |
| hs132675798 | CCTGCAGTCACTGTACATAAAGG | 6619 |
| hs132675801 | CGGTTGGAATCAGCAGATAGTGG | 6620 |
| hs132675985 | CAATGAGTGGATAATATTAGTGG | 6621 |
| hs132675950 | TAGCCTCTCAAACTATTTTGAGG | 6622 |
| hs132675761 | CTACATATGTACACCTCTTAGGG | 6623 |
| hs132675965 | TATTTCTTATCACGATTAAGTGG | 6624 |
| hs132676002 | AATGAGGCTTTCTCAGTCTTGGG | 6625 |
| hs132675867 | GCATATTTTGTAACATAGGCAGG | 6626 |
| hs132675921 | ATATGGAACGGGCTGAAAATCGG | 6627 |
| hs132675799 | TTGTGTCCTGTGCTAAATTACGG | 6628 |
| hs132675770 | CTTCTTCCAGCATCTCATAAGGG | 6629 |
| hs132675739 | TTGAGAATAGACTTAACTTCTGG | 6630 |
| hs132675875 | AGTATGTTGCATTAGAAAAAGGG | 6631 |
| hs132675978 | GTTACCATCTTAGTGGCATTTGG | 6632 |
| hs132675954 | ACTTAGAATGAGTACATTGATGG | 6633 |
| hs132675973 | GCCACCCCTGTTCTGGGCCATGG | 6634 |
| hs132675775 | CTTTCCTTCTGGGAAGGTTAAGG | 6635 |
| hs132675910 | ATACAGTTCAGAGTGCCTTTTGG | 6636 |
| hs132675870 | GACAGTAGAAAAACAGTAATAGG | 6637 |
| hs132675918 | TATTTGACACCATCACTATATGG | 6638 |
| hs132675852 | TGAATTGTCCAGTAAAAGTATGG | 6639 |
| hs132675945 | ACATGGCTGCTGAATTTAATAGG | 6640 |
| hs132676013 | GGATCATCACGGTATAAAATAGG | 6641 |
| hs132675790 | ATAATCCACTCCTAAATAATAGG | 6642 |
| hs132675952 | GCATCAATCTGGTTTAGTTCTGG | 6643 |
| hs132675885 | AAGGGCTTCTACCATTTAATAGG | 6644 |
| hs132676010 | ATAGGTTCTGGTACATTTACAGG | 6645 |
| hs132675781 | GGCATTTGTTAACTTCTATATGG | 6646 |
| hs132675737 | TATTATGTCTCATTACTAATTGG | 6647 |
| hs132675992 | TCTATTTGACCTCTGCAAAATGG | 6648 |
| hs132675710 | CATGATCTGGAACCATACTGGGG | 6649 |
| hs132675704 | AATGGAACGTTAGATCAATGTGG | 6650 |
| hs132675598 | GCACAATTAGGAATGTCATGAGG | 6651 |
| hs132675643 | AGCAACCTGATTTAGAACAGAGG | 6652 |
| hs132675617 | GGTCAGGGACAGATAAAACAGGG | 6653 |
| hs132675605 | TGCCAAATACAAAAAGAAGGGGG | 6654 |
| hs132675550 | AAATGGGGAAGGTAAGACAAGGG | 6655 |
| hs132675700 | ATATGTATCCCATAGAACACTGG | 6656 |
| hs132675613 | TATTTTGACAGAGAAAGAGTGGG | 6657 |
| hs132675626 | AAAACGTTAGAGAGCCAACAAGG | 6658 |
| hs132675642 | AGGTTGCTGAGTAATTCACCTGG | 6659 |
| hs132675685 | GGCAAAGTTAGAATACAACCTGG | 6660 |
| hs132675556 | GGTTAACATTAAATGCTGTGTGG | 6661 |
| hs132675675 | GTGTGTGTATTTGAGAGAGAGGG | 6662 |
| hs132675515 | GGAAGATTCTAAGTATCAAGTGG | 6663 |
| hs132675691 | GTATCAATATGTTTGACACTGGG | 6664 |
| hs132675547 | AGTAAAAAAAGGACATAGGTGGG | 6665 |
| hs132675681 | CCATCATCAGATACGTAGTGTGG | 6666 |
| hs132675635 | AGCCACATGCTTAACACTAAGGG | 6667 |
| hs132675490 | TTGTCAATGAAAATTAAGCATGG | 6668 |
| hs132675661 | GGCATAGGAAAATGGTAGAGTGG | 6669 |
| hs132675644 | AATTCACCTGGAAACCCAGTCGG | 6670 |
| hs132675532 | GGGGTATTGGAAAATATGGAGGG | 6671 |
| hs132675639 | TCAATACAGTTAGATGAGAAGGG | 6672 |
| hs132675518 | GATTCTAAGTATCAAGTGGTGGG | 6673 |
| hs132675696 | CGTGAAAGTGGTTATAGTGGAGG | 6674 |
| hs132675517 | AGATTCTAAGTATCAAGTGGTGG | 6675 |
| hs132675536 | ATAAGCTTGTTAGCTGTTAGGGG | 6676 |
| hs132675486 | CCTATTTGACTGGAATAGTGTGG | 6677 |
| hs132675578 | AATAAGGTAAGTTAAGATTGGGG | 6678 |
| hs132675603 | TCTGCCAAATACAAAAAGAAGGG | 6679 |
| hs132675507 | ATGTTTTGTAAAATCTGAAGCGG | 6680 |
| hs132675634 | GGCCCTTAGTGTTAAGCATGTGG | 6681 |
| hs132675698 | ACATTAGCGGAGCGTGAAAGTGG | 6682 |
| hs132675568 | GGGATGAAACATAATATGGCTGG | 6683 |
| hs132675572 | CACATATTATTATAACCAGCAGG | 6684 |
| hs132675597 | TGTGCCAACGACAATCGCTATGG | 6685 |
| hs132675690 | CTGGGAATCCCAGTAAATCCAGG | 6686 |
| hs132675645 | ATTCACCTGGAAACCCAGTCGGG | 6687 |
| hs132675625 | ATTGAAGTCTTCCACTTGAAGGG | 6688 |
| hs132675610 | CAGGAGAGAGTATATAAATGAGG | 6689 |
| hs132675672 | CGTTTCATTTACCCAACCCAGGG | 6690 |
| hs132675659 | TCTAGAAGCAGGATTGGCATAGG | 6691 |
| hs132675649 | TGGGGTTAATTAAATCCAGCTGG | 6692 |
| hs132675552 | GTAAAACTAACCAACTATGAAGG | 6693 |
| hs132675637 | CTTCTCATCTAACTGTATTGAGG | 6694 |
| hs132675705 | ACATTGATCTAACGTTCCATTGG | 6695 |
| hs132675627 | CTAACGTTTTTCCCTTCAAGTGG | 6696 |
| hs132675665 | TTAGGCAATGCATTTAGCCCTGG | 6697 |
| hs132675680 | CCACACTACGTATCTGATGATGG | 6698 |
| hs132675525 | ATAATTTATCCCAACAGCACTGG | 6699 |
| hs132675699 | TGTTGAAACATTAACATTAGCGG | 6700 |
| hs132675669 | CCTGGGTTGGGTAAATGAAACGG | 6701 |
| hs132675524 | GCTGAGTTTGCATAAGGTGTTGG | 6702 |
| hs132675702 | TCTTAATTAGTTCATTCCAATGG | 6703 |
| hs132675686 | AACTTTGCCGAGAATGGTGTTGG | 6704 |
| hs132675541 | TCATTTTTTTCTGTAGGCAATGG | 6705 |
| hs132675652 | TTAATTAACCCCATCCCGACTGG | 6706 |
| hs132675573 | ACTTGTACTTTGGTTCCTGCTGG | 6707 |
| hs132675561 | ATTAAAAATCTGGTGATCCTTGG | 6708 |
| hs132675574 | ACTGTCAGCTACTTGTACTTTGG | 6709 |
| hs132675501 | AATCCAAGTGCAGGAAACTATGG | 6710 |
| hs132675496 | TTAAATAGAAATATTTTAAAGGG | 6711 |
| hs132675660 | GCAGGATTGGCATAGGAAAATGG | 6712 |
| hs132675567 | CCTGGGGATGAAACATAATATGG | 6713 |
| hs132675653 | GTCAGGTGTCTTGCTCCAGCTGG | 6714 |
| hs132675531 | CCTAACAGCTAACAAGCTTATGG | 6715 |
| hs132675611 | TATACTCTCTCCTGTCATATTGG | 6716 |
| hs132675559 | GGTTGCAAGTCAATAAATTATGG | 6717 |
| hs132674283 | AGGCTTCTAAGAAGTCACTGTGG | 6718 |
| hs132672277 | AAAGAAGTTGAACCTCATGGCGG | 6719 |
| hs132673128 | TGATTAAGCCAAAATCACAGAGG | 6720 |
| hs132675048 | GACAACGGCCAAAATCAGTGTGG | 6721 |
| hs132674950 | TTCACATCACGACCTCACTGAGG | 6722 |
| hs132672183 | TAAGGTACAACTGTGTACGGGGG | 6723 |
| hs132674056 | CCACCCAGTAGATTTCCATGTGG | 6724 |
| hs132672163 | AGATTGTACATAGAAAACTGAGG | 6725 |
| hs132672089 | CTACGGATAGAAGTAGACCAAGG | 6726 |
| hs132673075 | TCACGTCTTGAAGCACCAGGTGG | 6727 |
| hs132675182 | TTTAACAAATCAGCCCCTAGGGG | 6728 |
| hs132672199 | AAGCATGATAAGAATCATGGAGG | 6729 |
| hs132672364 | TTGTTACAAGTAGAAAACAGTGG | 6730 |
| hs132673420 | GTGTAAGATTGTGTCTACAGTGG | 6731 |
| hs132672437 | GTTATACTTGATACACAGTGAGG | 6732 |
| hs132674934 | TCTGCTGTTTAACTACAGTGAGG | 6733 |
| hs132674077 | TAGCAGATCTAGCAGCTCTGGGG | 6734 |
| hs132673921 | ATATATGAGAGAAATCAACAAGG | 6735 |
| hs132674282 | TATGCATCACCTCTACCACAAGG | 6736 |
| hs132674043 | AATGAGCAGATTATATACTGGGG | 6737 |
| hs132673572 | TATGTACCTAGGACCTAATGGGG | 6738 |
| hs132672367 | TGCTTGCCTAGAGCATAACAGGG | 6739 |
| hs132673305 | TATTGGCATTCACATCCCAGTGG | 6740 |
| hs132672482 | TAACTGAAAACTGAAACCAGTGG | 6741 |
| hs132672548 | CTAAGCGTCTGCATACCTGGGGG | 6742 |
| hs132673330 | GCTCATCTGGACAATCACAAGGG | 6743 |
| hs132672280 | TTTGCCTTCAGACCGCCATGAGG | 6744 |
| hs132673242 | ACTGGACATAGCTAATCACACGG | 6745 |
| hs132673250 | GCAGATGTGTGAACATCTGGAGG | 6746 |
| hs132674112 | AAGCTGTTCATTGTGTACAGCGG | 6747 |
| hs132675207 | ATAACATCAAGAGAACACACTGG | 6748 |
| hs132672827 | TTTTTTGCTGAAACTAAACGAGG | 6749 |
| hs132674853 | TCAAACCTAAGGATGGTGGGGGG | 6750 |
| hs132675364 | GAAAACGAGACCATAAGCAGTGG | 6751 |
| hs132673156 | AGAACATCCATAATAACACAAGG | 6752 |
| hs132674072 | GCTACTCTCCTCCCTCAAAGCGG | 6753 |
| hs132673886 | ATTGCAGTAAGAGTAAATGGGGG | 6754 |
| hs132673203 | ATGTGGTTGAAATGTGACCATGG | 6755 |
| hs132674317 | TCTGTAAGATAAAAACATGGAGG | 6756 |
| hs132674407 | TATTTATATAGAGCACTAGGAGG | 6757 |
| hs132672475 | TATGTGGGATGGTGTCATGGTGG | 6758 |
| hs132672590 | CCTGATGACCAGAAACCCAGGGG | 6759 |
| hs132673370 | AACCACAGAATGCTTTACAGAGG | 6760 |
| hs132672631 | TGTGGTGCTGTAGAGATATGGGG | 6761 |
| hs132673371 | CAGACCTGCCCTTATCTTGGGGG | 6762 |
| hs132673675 | GCAGTGCAGAGGGTTTGTGGTGG | 6763 |
| hs132674316 | ACTTCTGTAAGATAAAAACATGG | 6764 |
| hs132674687 | GTAAGTGTGTGTACTATGAGGGG | 6765 |
| hs132675166 | TAATGAGAAATGCAGCCATGAGG | 6766 |
| hs132673353 | AATGCCAAGAAAAGTGACCGTGG | 6767 |
| hs132675036 | GACTACTATTAAATTAACTGGGG | 6768 |
| hs132673668 | GGTTTCCAAAACCTGACACAGGG | 6769 |
| hs132672948 | ATTTGAATATAGACCTCACATGG | 6770 |
| hs132675399 | ATACTGCAAACTAAGGACGTAGG | 6771 |
| hs132672125 | AGTGGGATAGTAATAGTTTGGGG | 6772 |
| hs132672299 | TGGCTAATCGGACTTCCCTGAGG | 6773 |
| hs132674330 | AATGGGTACAGAACACATGGTGG | 6774 |
| hs132672887 | ATAAACTATTTATGACACTGCGG | 6775 |
| hs132674526 | AGTAATGGGACTAAGACCGGAGG | 6776 |
| hs132675438 | GCCTTGAGAATTGAGAACAGAGG | 6777 |
| hs132672775 | TAGGTGTTACGAGTGTTGAGTGG | 6778 |
| hs132675212 | ACGTAAATGTTATTTCCCAGTGG | 6779 |
| hs132673682 | GTTGGAGTATACTCCCTGTGTGG | 6780 |
| hs132674626 | GTGCCAGGTAAGAAGCGTAGAGG | 6781 |
| hs132674061 | GATGCCATAAATGACTGGAGTGG | 6782 |
| hs132672889 | AAACTATTTATGACACTGCGGGG | 6783 |
| hs132673855 | ATACAGTGCAAAATACAAAGAGG | 6784 |
| hs132672219 | GTATTCTTAGGTTTTGCGGGGGG | 6785 |
| hs132672877 | ACTATGATCCATGATATGAGAGG | 6786 |
| hs132675449 | AATGAGTAACCATCCAACAGAGG | 6787 |
| hs132673633 | TTAAAGAGATTATAGCAACTGGG | 6788 |
| hs132672665 | TAAGGTGATATAAAACCTAGAGG | 6789 |
| hs132674169 | CTATTACTATGCCTATAATGCGG | 6790 |
| hs132673937 | ATATAGAAATGCATCTAAGGGGG | 6791 |
| hs132674756 | AGACGAATGTAGTATGTCTGGGG | 6792 |
| hs132672319 | TGAGCATCAACCTCCCCACAGGG | 6793 |
| hs132672208 | ACTCTGGCAAAGTTTCAGAAGGG | 6794 |
| hs132674929 | AAAAGAGACAGCCAGAAGTGGGG | 6795 |
| hs132675434 | AGTTGGAAAAGTGAAATCGGTGG | 6796 |
| hs132673980 | AGTGGAATAGTAATAGTTGGGGG | 6797 |
| hs132674255 | TAAGAAAATCGTGGTCCCAGTGG | 6798 |
| hs132672306 | CTCTTCTTTAGATTTCCCAGCGG | 6799 |
| hs132673050 | GTAGGAATAGAGCCTACCAGTGG | 6800 |
| hs132672257 | TGTTAAGAAACTCAATACAGAGG | 6801 |
| hs132673979 | GTGGAATAGTAATAGTTGGGGGG | 6802 |
| hs132674779 | TTAAATATGAAATAGTAACATGG | 6803 |
| hs132674733 | TAGGCCAGCAGTACTATGGTGGG | 6804 |
| hs132674994 | ATATCTTAAATTCCTCAGAGTGG | 6805 |
| hs132673317 | TAGGTAAGAGGAAAAATGCGAGG | 6806 |
| hs132673866 | TGGAAGGCAAGCCTGTAGAGAGG | 6807 |
| hs132674337 | TTTTGTTTAGAAAGAACATGGGG | 6808 |
| hs132672555 | ATAGTTTTAGTGAGATGACAAGG | 6809 |
| hs132674488 | ACTAAGAAAGAGCACTCCAGAGG | 6810 |
| hs132674123 | CTTTAGTGTATTCATATGTGAGG | 6811 |
| hs132673403 | CCAGCTAGTAAGCACACTCAGGG | 6812 |
| hs132673077 | ACTTCACGTCTTGAAGCACCAGG | 6813 |
| hs132672584 | AGGTAGAGCTCTACTAGCAGGGG | 6814 |
| hs132672323 | TTCCTAATACAAACCCTGTGGGG | 6815 |
| hs132672881 | AGAAATTGCATATATTCCAGGGG | 6816 |
| hs132672186 | ATAGGCATTTCCAAAGACTGTGG | 6817 |
| hs132672615 | GGAAAGCTTTCCTAATCAAGGGG | 6818 |
| hs132674392 | TATTTTGGAGAGTCATCACAGGG | 6819 |
| hs132673209 | CTTCTCTTAAGATTCCACAATGG | 6820 |
| hs132674519 | AATGGCCTGCTAAAGGGCAAGGG | 6821 |
| hs132675183 | ATAATTTCTATCTCCCCTAGGGG | 6822 |
| hs132672426 | GCTTAAGTGATTGTCACCTGCGG | 6823 |
| hs132672486 | TATTTTCTAAGCACTACTGGAGG | 6824 |
| hs132673012 | CTATATGACCATGGTCCAGGAGG | 6825 |
| hs132674195 | GAGTATGATCTTCTATAACACGG | 6826 |
| hs132672749 | ATATGTTGCCAAGAAATCAGAGG | 6827 |
| hs132674840 | TCAAAAAGGTTAAGAACCCGAGG | 6828 |
| hs132673006 | GTAAAAACGTTGTCTCAGCAGGG | 6829 |
| hs132672657 | GTAGGAGTGTTATCATACTGAGG | 6830 |
| hs132673342 | TTCTGAAAATCATAAAGACAGGG | 6831 |
| hs132673603 | CATTGCATACCATTTAGCTGGGG | 6832 |
| hs132674331 | ATGGGTACAGAACACATGGTGGG | 6833 |
| hs132673051 | TAGGAATAGAGCCTACCAGTGGG | 6834 |
| hs132675041 | TTTGTCCTATGTGACAACAATGG | 6835 |
| hs132675211 | AGTGGCCTAAAAGTTAGAAGAGG | 6836 |
| hs132673560 | AGTTAGTACCCATAGAGGTGAGG | 6837 |
| hs132673314 | CCACCAGCTGAGTCTATCTGTGG | 6838 |
| hs132673218 | TATTGTCACATAAATAAGAGAGG | 6839 |
| hs132674221 | GTAAAACTAAGAAACGTCAGTGG | 6840 |
| hs132672065 | AGTCAGATCAACTTAATGTGCGG | 6841 |
| hs132673519 | TGTTTGGGACAGCTACTCCAGGG | 6842 |
| hs132673885 | TTGCAGTAAGAGTAAATGGGGGG | 6843 |
| hs132673000 | TTTTTAACAAAAACTTACAAGGG | 6844 |
| hs132674707 | TATGCTAAAACATATACCTGTGG | 6845 |
| hs132672972 | AACTGAAGAAGGCCTGACGTTGG | 6846 |
| hs132673380 | AAATAGTATTGAGTGATGGGTGG | 6847 |
| hs132672448 | ATGGTATAAGGGCAGTCCTGGGG | 6848 |
| hs132674527 | GTAATGGGACTAAGACCGGAGGG | 6849 |
| hs132672990 | AAGCTGAATGATTCTCCAAGAGG | 6850 |
| hs132672383 | AGCAGGGATACAGTGGCAAGTGG | 6851 |
| hs132672191 | AACTGACAATAAAACAAAGGAGG | 6852 |
| hs132672531 | ATTCTTAACTCACAAGAGAGTGG | 6853 |
| hs132672518 | TGTCTTACTCTACATTCAGGGGG | 6854 |
| hs132672553 | TAAAACTATGAGTCAGCGGTGGG | 6855 |
| hs132672054 | TTCTTTACTGAGAACCAAAGCGG | 6856 |
| hs132674340 | TCTTCAAACACTAATTGTGGTGG | 6857 |
| hs132673530 | TGACTATTCATGTGACACAAAGG | 6858 |
| hs132672607 | CCAAGATCAGAGCCCATATGGGG | 6859 |
| hs132673946 | TTTCACTGCTCAGCAATATGCGG | 6860 |
| hs132672496 | TTGGGAGGTCCTAATTACAATGG | 6861 |
| hs132672845 | CATGTAGCTCACATATCCCATGG | 6862 |
| hs132674262 | TCATAAATAAAACTATCTGGTGG | 6863 |
| hs132672410 | TAAACTTAGGACAATTGTGACGG | 6864 |
| hs132672218 | TACGCTCCTTTCAGAGACTGTGG | 6865 |
| hs132675261 | ACTTCCTGAGAATGGTGACACGG | 6866 |
| hs132672586 | GCTAGTAGAGCTCTACCTGAGGG | 6867 |
| hs132673738 | TGGGAGACAAGCAGATACATGGG | 6868 |
| hs132673526 | GGCCTGCATCAGAGTCATCAGGG | 6869 |
| hs132674251 | TTAGAAATTATAATCCCACTGGG | 6870 |
| hs132673304 | ATTGGCATTCACATCCCAGTGGG | 6871 |
| hs132672463 | ATTCCTAAGGAAGAAACGAGTGG | 6872 |
| hs132672283 | AGAATGAGGTTAAGGTACCATGG | 6873 |
| hs132672697 | AGTACATAAATAAAGACATGAGG | 6874 |
| hs132672175 | GAAAACTTGAGAGAAATAGGAGG | 6875 |
| hs132674671 | GAACTGATAACAATGTTGCTCGG | 6876 |
| hs132675089 | AATTAGTAACAAGATGAGAGAGG | 6877 |
| hs132675340 | TGGTGGTTTCCCTAACACAATGG | 6878 |
| hs132674013 | TATGAATTATGGTTGCAGGAGGG | 6879 |
| hs132674843 | AATTGGCCTATAATACACCTCGG | 6880 |
| hs132674256 | ATTCTATGTTAAGAAAATCGTGG | 6881 |
| hs132672835 | TTGTCTAGGCCCTTACCAAGAGG | 6882 |
| hs132673015 | TAAGTATACCTCCTGGACCATGG | 6883 |
| hs132673985 | CATCTCCACATACATAGCAGTGG | 6884 |
| hs132673865 | ACTGAACTCTTAGAGAGCAGTGG | 6885 |
| hs132675055 | GCATGTGGAAATCTGTATGTTGG | 6886 |
| hs132672519 | GTGTCTTACTCTACATTCAGGGG | 6887 |
| hs132673920 | TATATGAGAGAAATCAACAAGGG | 6888 |
| hs132674037 | AAATCCCTGGATAGGCCAGGTGG | 6889 |
| hs132675397 | TGTTTTCTCTTAGTTCAGTGAGG | 6890 |
| hs132673497 | GAATCATAGACATACTTCAAGGG | 6891 |
| hs132674894 | AGACTAAGAATAAAAAGTAGGGG | 6892 |
| hs132673049 | GCCATGAGCAGAAAAAGAGTAGG | 6893 |
| hs132674463 | GACTCTTGCTTGATATAGGGGGG | 6894 |
| hs132674070 | TAGCACTCCTCAGTACTACCAGG | 6895 |
| hs132673010 | GCCTCTGCTCTATATGACCATGG | 6896 |
| hs132672799 | TCACATTGTTTGCCCCCATGGGG | 6897 |
| hs132675238 | GATATCAATTGGCTGAACAAGGG | 6898 |
| hs132672161 | TAGCGATGTCTTGGCAACAGTGG | 6899 |
| hs132673129 | GATTAAGCCAAAATCACAGAGGG | 6900 |
| hs132672405 | TTCCTGTTGATTAGGGCACACGG | 6901 |
| hs132674462 | TATAGGATGATCTAAGAACTCGG | 6902 |
| hs132675274 | ATGTTCTTACTTATTTACCAGGG | 6903 |
| hs132672910 | TTGATTTTACTTCAACCTAGAGG | 6904 |
| hs132672260 | AAGACAGTGACTAAAGGCAATGG | 6905 |
| hs132674032 | TCTCTTACCATAAACCCACCTGG | 6906 |
| hs132672384 | TCAATGAAGCAGGGATACAGTGG | 6907 |
| hs132674446 | TTCTTTCTACGTTTACAAGGGGG | 6908 |
| hs132674613 | ATGAATGTGCTCATGTGCATGGG | 6909 |
| hs132673232 | ACACCTTCCTATATCTGGGTAGG | 6910 |
| hs132673661 | CCTAACTTCATATGAAACACGGG | 6911 |
| hs132672164 | GATTGTACATAGAAAACTGAGGG | 6912 |
| hs132672109 | ACACAGCAGTGAATAGGCACAGG | 6913 |
| hs132674741 | AATCAAAGTGAAACATGAGAAGG | 6914 |
| hs132672282 | TGGCAGTGTAGTGCAATGACTGG | 6915 |
| hs132674991 | ATTTCTAGCAAGTCTCCTGAAGG | 6916 |
| hs132674276 | GAGCACACATCCCCTTCATGTGG | 6917 |
| hs132673731 | CATGCATTGAACCAAAACTCAGG | 6918 |
| hs132674346 | CTGGAAGACAAGCTAAGAGAGGG | 6919 |
| hs132672414 | GGTATGTAACTTCTAAACCCAGG | 6920 |
| hs132672670 | CCTTCAACTGTGGAAACCCAAGG | 6921 |
| hs132673776 | GAAAACAAGTTGGTTACAGGAGG | 6922 |
| hs132674292 | AGAAGGTAGAGCCACAACAAAGG | 6923 |
| hs132673809 | GTTTCCCAAATTGATCCACAAGG | 6924 |
| hs132672264 | ATTTTATGAAATGAGAGCAGTGG | 6925 |
| hs132672478 | ATACGCAACATCAGAATAAGGGG | 6926 |
| hs132675290 | AGCACTCTCTTAATATAGGGAGG | 6927 |
| hs132672386 | GAAGGCAATTCAATGAAGCAGGG | 6928 |
| hs132674666 | CAGTAAAATCAATAATAAAGGGG | 6929 |
| hs132674725 | CATATTACATGAAAGTGTGAGGG | 6930 |
| hs132672128 | TGGAATTCAAAACTGCCAGTAGG | 6931 |
| hs132672778 | GTAACAACAATAAAGAATTGTGG | 6932 |
| hs132674094 | AATGAAACTCTATCAACCGATGG | 6933 |
| hs132673669 | TGGTTTCCAAAACCTGACACAGG | 6934 |
| hs132673282 | GTGTACGGCACCATAGTCAAGGG | 6935 |
| hs132672325 | GTTTCCTAATACAAACCCTGTGG | 6936 |
| hs132673676 | CCACTCATAGTAAGCCACACAGG | 6937 |
| hs132674812 | GACATGGTTGATTCATGGAGCGG | 6938 |
| hs132672893 | GCCTAACGTTTACTAGATGTAGG | 6939 |
| hs132672614 | CGTTCCCATTGAGATAAGAGTGG | 6940 |
| hs132672467 | GGACCATTGGACAAACCAGATGG | 6941 |
| hs132674694 | TTACCATATAAATTACCAAGAGG | 6942 |
| hs132672724 | ATTGGTGCCTCTTTATATCGGGG | 6943 |
| hs132672431 | TTAGCGAGGAAGATAAGGGGTGG | 6944 |
| hs132674739 | ATTCTCACTTAATGTTCCAGTGG | 6945 |
| hs132674663 | GCTACTGTGCCACCTATCAGTGG | 6946 |
| hs132672173 | AGTACAGAATGGATTGCTGGAGG | 6947 |
| hs132674699 | TCTGTCGGGCATAAGAATGTCGG | 6948 |
| hs132673463 | TCTTAATAAAAGTTTTCTCGAGG | 6949 |
| hs132672295 | ATCTTGGGCAGTCAACCTCAGGG | 6950 |
| hs132674464 | GGACTCTTGCTTGATATAGGGGG | 6951 |
| hs132672651 | TATGGTCAGGACATTCACTTGGG | 6952 |
| hs132675028 | GGCAGCATCAGATTAACCTAGGG | 6953 |
| hs132674868 | TCGATAAGATGATTTTGGAGCGG | 6954 |
| hs132672355 | CAATGCTTCTCATTAAAGGACGG | 6955 |
| hs132673878 | ACAAGCCCCTTAACTGTCAGTGG | 6956 |
| hs132672251 | AATAAATGTTATGGACTTCGGGG | 6957 |
| hs132672213 | TGATGATAGCTTTAGAAGCGTGG | 6958 |
| hs132675414 | TGTATAGAAGCAATAAAAAGGGG | 6959 |
| hs132673013 | ACCATGGTCATATAGAGCAGAGG | 6960 |
| hs132673442 | ACACAGCACTCACAGAACTCAGG | 6961 |
| hs132674594 | CTGCGAAGTCCTGAATTCAGAGG | 6962 |
| hs132672730 | GTTACTCAACTAGAGAAGGTAGG | 6963 |
| hs132674874 | AGAACTACTGTATGGATCCGTGG | 6964 |
| hs132673938 | AATATAGAAATGCATCTAAGGGG | 6965 |
| hs132673811 | CAGATCTACACATAGATAGAGGG | 6966 |
| hs132673565 | TCTCCCATTGGGGACCTACGTGG | 6967 |
| hs132672220 | CGTATTCTTAGGTTTTGCGGGGG | 6968 |
| hs132674445 | TTTCTTTCTACGTTTACAAGGGG | 6969 |
| hs132672244 | TAATGTTTATAATTATGGGGTGG | 6970 |
| hs132674227 | ATTCTAAAGACAGCATCTGACGG | 6971 |
| hs132674509 | GTGCGAGTGTATCTTTCTAGGGG | 6972 |
| hs132674068 | TAATGTGCCCGCTTTGAGGGAGG | 6973 |
| hs132673758 | AAACACATTACCTGCCCACAGGG | 6974 |
| hs132674965 | AAACTAGAGCCAGAATAAGAGGG | 6975 |
| hs132675235 | TGTGATGATTACAGCAGAGGCGG | 6976 |
| hs132674051 | TTACATTGGCCATTTTTCTGGGG | 6977 |
| hs132674760 | TCTCCATGTATTGACAAGATGGG | 6978 |
| hs132672495 | GGAGGTCCTAATTACAATGGTGG | 6979 |
| hs132675336 | AAGTCTGAGACTTCAAGAGATGG | 6980 |
| hs132673974 | TTACAGTTAATAATTTCCTGAGG | 6981 |
| hs132672552 | CTAAAACTATGAGTCAGCGGTGG | 6982 |
| hs132673689 | CTATATGACAGAGTTGGCAGAGG | 6983 |
| hs132672735 | AATCATGATAGAGGATGCATGGG | 6984 |
| hs132674948 | ATCCACATATGACTCAAGGTGGG | 6985 |
| hs132672211 | ATTCTCAAACTAATTAACAATGG | 6986 |
| hs132673063 | CAACAGCAACAACAAAAGGGGGG | 6987 |
| hs132673285 | CATGACCATAGCCAAGTGTACGG | 6988 |
| hs132673253 | TAACTGACAGTGAGTGACAAAGG | 6989 |
| hs132673020 | CACGTTACATTTTAACAGTGGGG | 6990 |
| hs132672221 | GCGTATTCTTAGGTTTTGCGGGG | 6991 |
| hs132674234 | ATTGTATCAGAAATATCTAACGG | 6992 |
| hs132672524 | AAATTGAGCACTGCTTGAAGGGG | 6993 |
| hs132674127 | CATGCTCTAAACACCACTAAGGG | 6994 |
| hs132672739 | ATCAGATTATGTGGATGCAATGG | 6995 |
| hs132674848 | CCATTGCTCAAACCTAAGGATGG | 6996 |
| hs132672281 | GTCATTGCACTACACTGCCATGG | 6997 |
| hs132675234 | AAATGTGATGATTACAGCAGAGG | 6998 |
| hs132674609 | ATTGAGCAGCGATGTGCACAGGG | 6999 |
| hs132675233 | AAATGTTTATAAGTTTACACAGG | 7000 |
| hs132675467 | AAATGTGTATGCCCTATGGATGG | 7001 |
| hs132672129 | TTCCACATAATCTCAGAAGTGGG | 7002 |
| hs132674560 | TTACATCTAGGGATACAGACTGG | 7003 |
| hs132673295 | ATGCAGTGACAATATCAGAATGG | 7004 |
| hs132673485 | TTGCAAATCTGTCTAAACATGGG | 7005 |
| hs132673394 | ACTATGCTAGGCACAGGGCAGGG | 7006 |
| hs132675319 | GGGGAGAATTTTATTATTGGGGG | 7007 |
| hs132672432 | ATGTTAGCGAGGAAGATAAGGGG | 7008 |
| hs132674905 | AATGCCTCTTGATCAATCTGAGG | 7009 |
| hs132672542 | AGTGCTCTCAGACTGAGGATAGG | 7010 |
| hs132674491 | AGGTCAGACAGAATATGGATAGG | 7011 |
| hs132674726 | GCATATTACATGAAAGTGTGAGG | 7012 |
| hs132673390 | AAATATATAGAAACTATGCTAGG | 7013 |
| hs132672547 | GCTAAGCGTCTGCATACCTGGGG | 7014 |
| hs132672559 | CAATAAAGAAACAAAAACCTAGG | 7015 |
| hs132675392 | GTATAGCTCTTTATCCTCAGAGG | 7016 |
| hs132672472 | TCAGCACAAAACATTTATGTGGG | 7017 |
| hs132672210 | TCATTGAAGTGAATCCACTCTGG | 7018 |
| hs132674522 | ACTCTCTTATATTACAATCGTGG | 7019 |
| hs132674406 | ATATATTTATATAGAGCACTAGG | 7020 |
| hs132675287 | CCCCTGTGAATAACAAAGTGAGG | 7021 |
| hs132673907 | CATACAGATGAAGTAAAAGAGGG | 7022 |
| hs132673756 | ATAGATGAAAAGTTCCCTGTGGG | 7023 |
| hs132675123 | AATTAGAAAAATCTTTGCAGGGG | 7024 |
| hs132675296 | GTCTTACAGAGAAATCATAACGG | 7025 |
| hs132674814 | CATGGTTGATTCATGGAGCGGGG | 7026 |
| hs132673778 | GTTGGTTACAGGAGGAAGCAGGG | 7027 |
| hs132675255 | AACAACTCAAGAGTGATGCAGGG | 7028 |
| hs132674288 | TTCATATAGCCATTGAAGAGGGG | 7029 |
| hs132675444 | ATAGGCTAGAAGAAGAGTAGAGG | 7030 |
| hs132674947 | AATCCACATATGACTCAAGGTGG | 7031 |
| hs132673709 | ACAGAAGTCACAATGATAGTGGG | 7032 |
| hs132675073 | ATTTATTTACCATTTATCCAGGG | 7033 |
| hs132675325 | TGTTTCATTATTCTCCTAAGGGG | 7034 |
| hs132673427 | GTTTCAAAATGGACTTAAGGGGG | 7035 |
| hs132672420 | GGAAGCTACTCAGTCAGCATGGG | 7036 |
| hs132675343 | TTATGGCTGCAAATAAGATGAGG | 7037 |
| hs132674938 | TGTACTCTTGCCTCTTGAGGAGG | 7038 |
| hs132672263 | TTGAGGAGTATGAAAATGATGGG | 7039 |
| hs132674631 | AATATTCCCTGAAAACAGTAGGG | 7040 |
| hs132674634 | TGAATCACAAAAGGCACGAAGGG | 7041 |
| hs132675260 | CTCAGGAAGTCAAAATAAAGGGG | 7042 |
| hs132672322 | CTAATACAAACCCTGTGGGGAGG | 7043 |
| hs132673399 | TTTGTGTGTTTATGAGGACAGGG | 7044 |
| hs132672226 | GGTCAACCACAGTCTCTGAAAGG | 7045 |
| hs132673892 | AGCAAAACGACCACAAATAGGGG | 7046 |
| hs132673237 | TCTTGTATGTGCCGAGAAGGAGG | 7047 |
| hs132673415 | ATCTTCAGGGCAGTGATGCGGGG | 7048 |
| hs132673681 | CCTGTGTGGCTTACTATGAGTGG | 7049 |
| hs132674562 | CTAGATGTAAGATTCTGACCTGG | 7050 |
| hs132674108 | TTATTTCTCCTGCATTAATGGGG | 7051 |
| hs132674058 | ATTCCACATGGAAATCTACTGGG | 7052 |
| hs132673246 | AGAATCATGACTCTTTGAGAGGG | 7053 |
| hs132673662 | GCCTAACTTCATATGAAACACGG | 7054 |
| hs132672349 | AATGTTAAAAAATTTAACATGGG | 7055 |
| hs132673130 | ACAGAGGGTTACCAGTGACTTGG | 7056 |
| hs132675297 | ACAGTACATTCTACATGCGTTGG | 7057 |
| hs132672237 | ACAAATGGTCTCCTACAACTAGG | 7058 |
| hs132673079 | AAGTAATGTGATTTAGTGTGAGG | 7059 |
| hs132674529 | GTCCCATTACTTGAAAGAAGGGG | 7060 |
| hs132673289 | CTGTTACCAAAGGGAATGGGTGG | 7061 |
| hs132674076 | TCTGGGGCAACATTCTGCAATGG | 7062 |
| hs132674088 | GTCCTGACTAGCTCTCCTGCAGG | 7063 |
| hs132674147 | TAGCATACTGTTGTTGTGTGCGG | 7064 |
| hs132672925 | AATAATATCAATGCAAGCAGAGG | 7065 |
| hs132674542 | TAAGCATTTGAGAACATCAGTGG | 7066 |
| hs132674706 | GATATACAAGAAGCTGCAGAAGG | 7067 |
| hs132672317 | TAAACAACAAAAACTGTGAGAGG | 7068 |
| hs132675194 | AATATGATATTTGTGTGTGCGGG | 7069 |
| hs132673144 | TGATGGACTTTACCTAAGGTGGG | 7070 |
| hs132673523 | AGAGTCATCAGGGAAGGTGGTGG | 7071 |
| hs132674012 | TTATGAATTATGGTTGCAGGAGG | 7072 |
| hs132675228 | TGAGAGGGTTAATTCTCAGGAGG | 7073 |
| hs132673677 | CACTCATAGTAAGCCACACAGGG | 7074 |
| hs132673414 | TAATGAGCCAATGATCCTGATGG | 7075 |
| hs132673717 | TGTAATGTACAGAGAACTGAAGG | 7076 |
| hs132672427 | AAGCAAAGCACGAAAACCGCAGG | 7077 |
| hs132672498 | TTATTGTATTTGTAGTTGGGAGG | 7078 |
| hs132673164 | AATGAATCTTTCAAAAGGAGAGG | 7079 |
| hs132673863 | GCTAGAGCTAGGAAGTGAAAGGG | 7080 |
| hs132673329 | AGCTCATCTGGACAATCACAAGG | 7081 |
| hs132674235 | GCTTTATGAAACCCACGAGTGGG | 7082 |
| hs132674835 | GCCAATAAAATACATAAGGGAGG | 7083 |
| hs132674842 | ATTGGCCTATAATACACCTCGGG | 7084 |
| hs132673204 | GTGGTACTTTCGACTGTCCATGG | 7085 |
| hs132674775 | AATACACTCAGTATTCATGTAGG | 7086 |
| hs132672771 | ATCTGGTGATAAACGTTCAGAGG | 7087 |
| hs132673627 | CTAAAGCCAAGATTTGCTGAAGG | 7088 |
| hs132672685 | TGACAAGAAATAATCTAGAGAGG | 7089 |
| hs132672583 | CAGGTAGAGCTCTACTAGCAGGG | 7090 |
| hs132673971 | CTGAGGGACTACTTTCTGAGTGG | 7091 |
| hs132672094 | TTTCAATGCACAAGGCTGAAAGG | 7092 |
| hs132673951 | GCATATTGCTGAGCAGTGAAAGG | 7093 |
| hs132672435 | TAGACTATTTTATGTTAGCGAGG | 7094 |
| hs132674214 | AGATTTACAGACACATAGTAGGG | 7095 |
| hs132675114 | TAGAAGTCTAAACAAATGCTGGG | 7096 |
| hs132672886 | GCAATCTTAACTTTCTATGGAGG | 7097 |
| hs132673496 | AGAATCATAGACATACTTCAAGG | 7098 |
| hs132673286 | GTGTAACCAGGTCATCATAGTGG | 7099 |
| hs132675129 | TTTGTCTTATGGCAATCGTGTGG | 7100 |
| hs132674481 | TGAGTTGCTGTGACAGTCTGTGG | 7101 |
| hs132673876 | TCTTGGTCGTTGAATAACAATGG | 7102 |
| hs132674851 | GCTCAAACCTAAGGATGGTGGGG | 7103 |
| hs132675052 | CCATATAGCTGCTAGGACAACGG | 7104 |
| hs132674399 | AAGCACTGATCAAGAATGAGAGG | 7105 |
| hs132672098 | GTTTGTAAGATTATTAAGGAAGG | 7106 |
| hs132673760 | AACTAAGAGCAGCCCAACACAGG | 7107 |
| hs132674320 | TTCAGGAACATGTATTCCCAAGG | 7108 |
| hs132673198 | GGAAATTATTAACAGACCAGTGG | 7109 |
| hs132674435 | CAAGATGAATCTCCTTTGGAGGG | 7110 |
| hs132674298 | CTGCTCTTATATCTTTCCAAGGG | 7111 |
| hs132672873 | TGACAGTATGGCTTGAGAGAGGG | 7112 |
| hs132674389 | TGTTGTTATGCATCTTTCAGGGG | 7113 |
| hs132674421 | TGTCAATGCCTAACTGATGAGGG | 7114 |
| hs132673943 | TTAAGCTAGGAAAGAAAGTGGGG | 7115 |
| hs132674662 | TTCATCATTCCACTGATAGGTGG | 7116 |
| hs132674444 | TTTTCTTTCTACGTTTACAAGGG | 7117 |
| hs132673960 | TTTGCATATCTGAATTTCTGAGG | 7118 |
| hs132673293 | GGTGTGTTATCTGTTACCAAAGG | 7119 |
| hs132672837 | TTAACAGCTCCTCTTGGTAAGGG | 7120 |
| hs132672550 | CTTGAATCTTTCAAACCCCCAGG | 7121 |
| hs132672743 | TCAAATAGAAAGTATTACAAAGG | 7122 |
| hs132674228 | GGAATAGAGCTATTCATCCCTGG | 7123 |
| hs132672182 | CTAAGGTACAACTGTGTACGGGG | 7124 |
| hs132674085 | CTGTTAATGGAAAGTCTGGAAGG | 7125 |
| hs132673038 | ATAAGACTAAAAGAAAGGACAGG | 7126 |
| hs132674365 | ACCAAATGTACATTTGGAGAGGG | 7127 |
| hs132673913 | CATGTTTCGAAATAGAGAAGAGG | 7128 |
| hs132673933 | TTAATCCTGTAGACAAAATGTGG | 7129 |
| hs132675099 | ACTCAAACAGTTTCCAGCAAGGG | 7130 |
| hs132675473 | CTCTACCATACTAAAAGCAGTGG | 7131 |
| hs132672878 | TCTATAATATTGTAGTCCATAGG | 7132 |
| hs132673997 | TCTGCCTAACATTTATCATGAGG | 7133 |
| hs132675224 | TGAAATACCGTATATAGAGAAGG | 7134 |
| hs132675070 | CTGTTTAGCAAAACTAACCCTGG | 7135 |
| hs132675134 | ATAGGATTTATTCCTTGCAGAGG | 7136 |
| hs132673912 | ATGTTTCGAAATAGAGAAGAGGG | 7137 |
| hs132675446 | CTGTAATCTCTACGTCTGGAAGG | 7138 |
| hs132673806 | ATACAAGATTAATCTCCTTGTGG | 7139 |
| hs132675054 | ATGTGCTCCATATAGCTGCTAGG | 7140 |
| hs132672358 | TTAATAACGATAAAAAGTAATGG | 7141 |
| hs132673586 | AGTCTAGTAAATTTGGTAGGGGG | 7142 |
| hs132673690 | AGTGATCTATATGACAGAGTTGG | 7143 |
| hs132673812 | ATAGATAGAGGGACATTCCAAGG | 7144 |
| hs132673513 | AATCTTCCCAGGCAATTCTGAGG | 7145 |
| hs132675168 | TAATGTCACTGTATAGGCCAAGG | 7146 |
| hs132672847 | CATGGGATATGTGAGCTACATGG | 7147 |
| hs132672681 | AAATCACATGAATGGTAAGAGGG | 7148 |
| hs132674787 | ACTATACACACCAAGTCTGTAGG | 7149 |
| hs132675271 | CAAATTTGACCAAAAAAGGAAGG | 7150 |
| hs132672510 | CATGCTGTACTTTACAGGCATGG | 7151 |
| hs132672228 | TCATAACATCTTAAATAAGAGGG | 7152 |
| hs132673649 | AGAAATGTACTAGGTTTCATGGG | 7153 |
| hs132672958 | TCTTATCAGACATTTCACCTTGG | 7154 |
| hs132673273 | AATGTGTGTTCCATGTCAAATGG | 7155 |
| hs132674287 | TCATATAGCCATTGAAGAGGGGG | 7156 |
| hs132672156 | GGAAGAGTATTCGGGGCAGTGGG | 7157 |
| hs132675441 | CTACCATTTCAAAATTGGCATGG | 7158 |
| hs132673280 | TGGTGCCGTACACTTGGCTATGG | 7159 |
| hs132672159 | AGAATAAACATGCAGAGGTAGGG | 7160 |
| hs132675088 | TCACTGTGTTCTGCTATCTGAGG | 7161 |
| hs132673325 | CGAAGCATGAAATATTCAGAAGG | 7162 |
| hs132674746 | GGATTACTGGAGTAGAGGCAAGG | 7163 |
| hs132675471 | ATTCATAATATAGTGCAAGAAGG | 7164 |
| hs132672298 | AGTCCGATTAGCCAGTCGCTGGG | 7165 |
| hs132672596 | GATAGTTATACCAAGCCCCTGGG | 7166 |
| hs132673135 | TTTCTAGGCATCCAATAATGTGG | 7167 |
| hs132672589 | TCCTGATGACCAGAAACCCAGGG | 7168 |
| hs132673929 | TCATTTCTAATTTTTCTCTGGGG | 7169 |
| hs132674855 | CACCCATCTGTGCAAACGTGTGG | 7170 |
| hs132675400 | CTTAGTTTGCAGTATAGGGGAGG | 7171 |
| hs132673488 | GAGAATTCCATTCCTAACCTGGG | 7172 |
| hs132672729 | TATAGTTACTCAACTAGAGAAGG | 7173 |
| hs132674751 | ACATTCACAAGCAGCAGCAAGGG | 7174 |
| hs132672696 | ATAAATAAAGACATGAGGAAAGG | 7175 |
| hs132673369 | GGTTCCCCCAAGATAAGGGCAGG | 7176 |
| hs132673498 | TTCAAGGGATCCATGAACACTGG | 7177 |
| hs132672289 | TACTCACATTGACTTTCTTGGGG | 7178 |
| hs132672876 | AGGCAGAGAATGCTCAGCAGTGG | 7179 |
| hs132674606 | GGAAAGAGCTATCTTAAGGATGG | 7180 |
| hs132672706 | ACATTACCAAGTCCTGAGAAAGG | 7181 |
| hs132673791 | AATTTCTTGTTGAGCCGGAATGG | 7182 |
| hs132674954 | ACTCTAAAATTAGATGGCAAAGG | 7183 |
| hs132674089 | GGAGAGCTAGTCAGGACTCAGGG | 7184 |
| hs132675035 | GGACTACTATTAAATTAACTGGG | 7185 |
| hs132673784 | TAATCAGCAAGCTTAATCTAGGG | 7186 |
| hs132675083 | GAATTTTTAATAATAACTAAGGG | 7187 |
| hs132674625 | AATTGTCCCATGACTGTGCCAGG | 7188 |
| hs132675132 | TCTTCAGGTTTCCCTCTGCAAGG | 7189 |
| hs132674164 | TTTAATGGTATGTATTAATGCGG | 7190 |
| hs132675426 | AGGAGATCTTTCAATATGGATGG | 7191 |
| hs132673528 | TGTGCTTTGCTCTCAAAGTGTGG | 7192 |
| hs132673054 | GTTTTAATTTTCCCACTGGTAGG | 7193 |
| hs132672841 | GCTGTGATATACTTCACATTGGG | 7194 |
| hs132675230 | TACACAGGTTAAAATTGAGAGGG | 7195 |
| hs132674483 | TCTCGCTAGCTATAAATACCAGG | 7196 |
| hs132675180 | ACTTTAACAAATCAGCCCCTAGG | 7197 |
| hs132675012 | AGAGTCAGCATTTATTCTAGAGG | 7198 |
| hs132672660 | TGTTTAATGGTCTTTCACAATGG | 7199 |
| hs132675273 | TTTTTGTTCTAAAGTTACCCTGG | 7200 |
| hs132672744 | TAATAGAGCTAAGCTTCTAGAGG | 7201 |
| hs132673587 | CAGTCTAGTAAATTTGGTAGGGG | 7202 |
| hs132673239 | GTATGTGCCGAGAAGGAGGCTGG | 7203 |
| hs132674505 | TGATAGGAACATAGGAAAGTCGG | 7204 |
| hs132672254 | TAGTGCAGTCATCATAAATGAGG | 7205 |
| hs132672279 | CGGTCTGAAGGCAAATTCAAAGG | 7206 |
| hs132675263 | GGATTAAAACCAAACCCTAACGG | 7207 |
| hs132672540 | AAATACGTTTTTGTAAAGCACGG | 7208 |
| hs132674279 | CCTTCACTTTCCACATGAAGGGG | 7209 |
| hs132674910 | AGATTAACGTGAAGAAGGCTAGG | 7210 |
| hs132675384 | TTACTGTTTTATGAAAGGATAGG | 7211 |
| hs132672345 | TGTAGACCATATCATGGCAATGG | 7212 |
| hs132673595 | TGCTGAGTCACAGTTCTCAAGGG | 7213 |
| hs132673372 | ACAGACCTGCCCTTATCTTGGGG | 7214 |
| hs132674852 | CTCAAACCTAAGGATGGTGGGGG | 7215 |
| hs132673680 | TACTATGAGTGGCAGTGCAGAGG | 7216 |
| hs132673975 | TTCTGAAGCAGAAAAATACATGG | 7217 |
| hs132674253 | AAGAAAATCGTGGTCCCAGTGGG | 7218 |
| hs132672628 | AAAATATCAAAGACAACTAACGG | 7219 |
| hs132673684 | AAGCAAGCAAGCAATTAAGAAGG | 7220 |
| hs132674145 | CACACAACAACAGTATGCTATGG | 7221 |
| hs132675374 | CCTATTTTCTGATTATGATGTGG | 7222 |
| hs132675109 | GACTAGCTGTCACATAAGACTGG | 7223 |
| hs132672115 | GGGGCAATAAAAATAATGCTTGG | 7224 |
| hs132672304 | CGCTGGGAAATCTAAAGAAGAGG | 7225 |
| hs132672479 | ACAACTGACAAAATAACTGATGG | 7226 |
| hs132675420 | CTTGATAAGCACATGTACTTGGG | 7227 |
| hs132674093 | ACTCAGTAACACTCTCCTGCAGG | 7228 |
| hs132675284 | TCCTCACTTTGTTATTCACAGGG | 7229 |
| hs132672398 | GCAAATGCACAGAAGCTGGTGGG | 7230 |
| hs132674952 | AGTTAACTGAGAAAGAGTAGAGG | 7231 |
| hs132672872 | TTGACAGTATGGCTTGAGAGAGG | 7232 |
| hs132674857 | GTCCACACGTTTGCACAGATGGG | 7233 |
| hs132673290 | TATCTGTTACCAAAGGGAATGGG | 7234 |
| hs132675405 | CTCCCTTAGAGCTAAAAACAGGG | 7235 |
| hs132675453 | ATTACAACAGAAGTAGTGGCAGG | 7236 |
| hs132673911 | TTCGAAATAGAGAAGAGGGATGG | 7237 |
| hs132674374 | GACTCATCTTAATTTTCACATGG | 7238 |
| hs132674677 | TAAAAATGTCTAAATGCTAGTGG | 7239 |
| hs132674809 | CTGACATTAATAGCTTGGATCGG | 7240 |
| hs132673429 | ATTTTGAAACAAACTTAGCAAGG | 7241 |
| hs132672652 | TTATGGTCAGGACATTCACTTGG | 7242 |
| hs132672324 | TTTCCTAATACAAACCCTGTGGG | 7243 |
| hs132674623 | TGTTGAACCATATGAAGCCCAGG | 7244 |
| hs132672588 | TTCCTGATGACCAGAAACCCAGG | 7245 |
| hs132673445 | GAGAAAGATGGAAGCTAAGGAGG | 7246 |
| hs132674459 | TATTAACTCTTTAGGATACAGGG | 7247 |
| hs132673730 | GAACCAAAACTCAGGCCGTAAGG | 7248 |
| hs132673428 | GAAACAAACTTAGCAAGGAGTGG | 7249 |
| hs132675191 | ATAAAGGGTAAATTCAAGCCAGG | 7250 |
| hs132672447 | GATGGTATAAGGGCAGTCCTGGG | 7251 |
| hs132675029 | AGGCAGCATCAGATTAACCTAGG | 7252 |
| hs132673408 | TTTTAGAAGAGATTACCATCAGG | 7253 |
| hs132674670 | ACAGAGAGTCATTACTAGATGGG | 7254 |
| hs132672169 | GTAAATACTTTTCAATGAGAGGG | 7255 |
| hs132672616 | GGGAAAGCTTTCCTAATCAAGGG | 7256 |
| hs132674062 | CATCTGACTTTGATTCCACATGG | 7257 |
| hs132672914 | TCTCTAATCTGCACTAGAGAAGG | 7258 |
| hs132673813 | TCTATCTATGTGTAGATCTGTGG | 7259 |
| hs132673576 | CAAAAAATAGAAGCCAATGTGGG | 7260 |
| hs132672180 | TCTAAGGTACAACTGTGTACGGG | 7261 |
| hs132673062 | CCAACAGCAACAACAAAAGGGGG | 7262 |
| hs132673029 | GGACAGAAGAGTGTCTTCCTAGG | 7263 |
| hs132674270 | ACTGCATTATCCTTGTAGACAGG | 7264 |
| hs132672960 | TCACATTTTCTCATAGGCCAAGG | 7265 |
| hs132673569 | TTGCCACGTAGGTCCCCAATGGG | 7266 |
| hs132672259 | TTATGTAAGACAGTGACTAAAGG | 7267 |
| hs132674240 | CCCCATTCATATGTCATGAAGGG | 7268 |
| hs132674233 | TACAATCTTTGCCCACTCGTGGG | 7269 |
| hs132672193 | AAGGAGGAAGAGGACGAAAGAGG | 7270 |
| hs132673043 | GAATCTTTAATATAGGTAGTGGG | 7271 |
| hs132673699 | AAGAGATCATACTTTTACTGTGG | 7272 |
| hs132675133 | TAGGATTTATTCCTTGCAGAGGG | 7273 |
| hs132672875 | GGCAGAGAATGCTCAGCAGTGGG | 7274 |
| hs132672044 | TGAAAGCTACTCTGTTAGATGGG | 7275 |
| hs132674111 | ATAAATGACCCCATTAATGCAGG | 7276 |
| hs132673153 | AATTGAATGGAGGTAAAACTAGG | 7277 |
| hs132673299 | ACATTGGCTTTATTTTAGAACGG | 7278 |
| hs132674171 | TTAGCGGTGTTGCTTTTGGTTGG | 7279 |
| hs132673774 | CAGAGTAAGTGAAAACAAGTTGG | 7280 |
| hs132675060 | TGTACAGAAGGATACAAGGCAGG | 7281 |
| hs132675165 | TATTTAGCATTAGAACCTCATGG | 7282 |
| hs132672419 | TGGAAGCTACTCAGTCAGCATGG | 7283 |
| hs132673867 | GAACTTTGAAAGGTTATGGAAGG | 7284 |
| hs132674137 | AGTAATAGTAAATGAGGCTGGGG | 7285 |
| hs132674901 | TAGAGCACGAGCATTTGTGCAGG | 7286 |
| hs132673465 | ATGATTCATTACTATAAGCAGGG | 7287 |
| hs132673412 | TTATCTTCAGGGCAGTGATGCGG | 7288 |
| hs132672541 | ACTCAAGTGCTCTCAGACTGAGG | 7289 |
| hs132674897 | ATGTGGTCAAATCAACCCATTGG | 7290 |
| hs132674591 | ATTCTAATCACCCCATCTGAAGG | 7291 |
| hs132672348 | GTTAAAAAATTTAACATGGGAGG | 7292 |
| hs132672767 | CATTGTGTACCAAGCTCTTGAGG | 7293 |
| hs132672084 | AAGTCCGTTAGCACAAAAGCAGG | 7294 |
| hs132673767 | TTTAACTTATATTTTATACCTGG | 7295 |
| hs132674930 | GAAAAGAGACAGCCAGAAGTGGG | 7296 |
| hs132674453 | TATATTAGTTCACTTACATAGGG | 7297 |
| hs132673214 | ATTTATGGTATCTATGGAAGAGG | 7298 |
| hs132672953 | GGCTGAAGTCATTTAATCCATGG | 7299 |
| hs132675401 | GTCCTTAGTTTGCAGTATAGGGG | 7300 |
| hs132674973 | AGGTTACTCATTTTATTACAGGG | 7301 |
| hs132673495 | GTCTTTGAGTAACATATCCCAGG | 7302 |
| hs132674992 | TCACAGTTGTCATGGATACATGG | 7303 |
| hs132674504 | ACATTAAATGATAGGAACATAGG | 7304 |
| hs132672121 | TTTCATTTACATAAAACATGTGG | 7305 |
| hs132674468 | CCAAGCATAATTACCCGTGATGG | 7306 |
| hs132673786 | AGTTACTGCAACTGAATGACAGG | 7307 |
| hs132673934 | AATGTGGAAGTAACAAAGACAGG | 7308 |
| hs132675464 | TGCAGTATGCTCCATCCATAGGG | 7309 |
| hs132675104 | AGAGAGACAACTGTGCAGACAGG | 7310 |
| hs132672802 | GGCGTTAAAAAAATCCCCATGGG | 7311 |
| hs132675150 | ATAATTATAAGTGATATCACAGG | 7312 |
| hs132672908 | AAGGCAGTCATGGTTCCTCTAGG | 7313 |
| hs132673881 | TATGACCACTGACAGTTAAGGGG | 7314 |
| hs132674735 | ATGGTGGGAACAAACTCCACTGG | 7315 |
| hs132674411 | AGTCAGAGTATCAAAATCACTGG | 7316 |
| hs132673691 | TCTATGGTATCGGGATAAGATGG | 7317 |
| hs132674100 | GAAGTTACTGCAATATTAGGAGG | 7318 |
| hs132673065 | ACAGCAACAACAAAAGGGGGGGG | 7319 |
| hs132674616 | AGTTTTTTAGAATTCTTGCTGGG | 7320 |
| hs132675163 | TGTAATAGACACTTTGTGGATGG | 7321 |
| hs132675231 | TTACACAGGTTAAAATTGAGAGG | 7322 |
| hs132673973 | TACAGTTAATAATTTCCTGAGGG | 7323 |
| hs132674740 | GAAGGTTAGGAATTTTACGTTGG | 7324 |
| hs132673533 | TTAATAATAGTAAAAAAGCCAGG | 7325 |
| hs132672920 | GTGATTATAGAGGTGTAAGCAGG | 7326 |
| hs132673735 | CTTCAGCAATGTGATGAGTAGGG | 7327 |
| hs132674313 | AGACTATGCATGAAGTACTAAGG | 7328 |
| hs132672732 | AGTTGAGTAACTATATATGTAGG | 7329 |
| hs132674096 | ATTTGTTAATAGGTGACCATCGG | 7330 |
| hs132674060 | AGTCAGATGCCATAAATGACTGG | 7331 |
| hs132672309 | TCAGGCCAAGTTTCTGCCAAGGG | 7332 |
| hs132674961 | AGCCACACTAAAGTTATCAAAGG | 7333 |
| hs132673479 | CTACAGGTAATAACATGACTTGG | 7334 |
| hs132674432 | AATATGTCATGAATTAATAACGG | 7335 |
| hs132673119 | ATTACTAGGAGATTCAAAAACGG | 7336 |
| hs132672372 | TAAGTTCCATTTGTATTGGTAGG | 7337 |
| hs132675018 | GGTCCCTTTATACTCCTGTAGGG | 7338 |
| hs132675220 | CTTTGTCATCAAAAAGGCAATGG | 7339 |
| hs132674960 | GCCACACTAAAGTTATCAAAGGG | 7340 |
| hs132674335 | GATTTTGTTTAGAAAGAACATGG | 7341 |
| hs132672275 | TATGAAACACTCATCAGAAACGG | 7342 |
| hs132675450 | TGGGGAGATCCTCTGTTGGATGG | 7343 |
| hs132674038 | AAGAAATCCCTGGATAGGCCAGG | 7344 |
| hs132672341 | ACAAAGTGCTGGAAGTAAAGTGG | 7345 |
| hs132673292 | GTGTGTTATCTGTTACCAAAGGG | 7346 |
| hs132672403 | AAAACTCCTAAAGTCACAGTTGG | 7347 |
| hs132675102 | GTGAAGCAATAAATAGAAGAAGG | 7348 |
| hs132672956 | TGCTTTATTTGAGCTTAGAGAGG | 7349 |
| hs132673584 | GTTCCATTTCCTCCCCACATTGG | 7350 |
| hs132672951 | GATAAACTACAAAGAGTGCCTGG | 7351 |
| hs132674321 | GGAACATGTATTCCCAAGGTTGG | 7352 |
| hs132672278 | TGAACCTCATGGCGGTCTGAAGG | 7353 |
| hs132674688 | GGTAAGTGTGTGTACTATGAGGG | 7354 |
| hs132673064 | AACAGCAACAACAAAAGGGGGGG | 7355 |
| hs132674987 | ACACTTGCAAAAGTATAACTAGG | 7356 |
| hs132674168 | GTAATAGGATTACATTTACCTGG | 7357 |
| hs132672781 | CTAATTTTTTTCAGAATGGGAGG | 7358 |
| hs132673550 | AAGCTCTTGTTACTTTGAGAGGG | 7359 |
| hs132673706 | GCACAATGATTTAATGGCTAGGG | 7360 |
| hs132673679 | ACTATGAGTGGCAGTGCAGAGGG | 7361 |
| hs132674126 | TCATGCTCTAAACACCACTAAGG | 7362 |
| hs132672810 | GTTTGCTTATTCAACACCCATGG | 7363 |
| hs132673229 | CCTCCAAAAGATGAGATTCGAGG | 7364 |
| hs132674071 | CTACTCTCCTCCCTCAAAGCGGG | 7365 |
| hs132673493 | AACATATCCCAGGTTAGGAATGG | 7366 |
| hs132674289 | TTTCATATAGCCATTGAAGAGGG | 7367 |
| hs132673611 | ATAATATCATTATTGTACTCAGG | 7368 |
| hs132672966 | AAAAATACAGGAAGAAGAAGAGG | 7369 |
| hs132672858 | TGATGCCAAGAACACAACTCTGG | 7370 |
| hs132672394 | CAAAAACTATCCCAGCGAAGAGG | 7371 |
| hs132675066 | GCACTGTTAGTGTAGTTGTAAGG | 7372 |
| hs132673416 | TTCAGGGCAGTGATGCGGGGTGG | 7373 |
| hs132675377 | CTCCTATTCTGTAAGTTCAAAGG | 7374 |
| hs132675043 | ACAATGGTATTAAATATTGGTGG | 7375 |
| hs132673081 | GATTTAGTGTGAGGAAAGAAAGG | 7376 |
| hs132674158 | ATGTTTGGATTCATAAGTGTTGG | 7377 |
| hs132672201 | GTTTGCTGCTGGTTGGCTGGGGG | 7378 |
| hs132674876 | TTTAAATATACCAAAATCCACGG | 7379 |
| hs132672272 | TCACTATTTTCATTCTGAGACGG | 7380 |
| hs132674854 | CCATCCTTAGGTTTGAGCAATGG | 7381 |
| hs132673437 | TTTATAGAGCATTTGTATGGGGG | 7382 |
| hs132673137 | TAATGTGGTTGCGTAGGCACAGG | 7383 |
| hs132672252 | CATTTATGATGACTGCACTAAGG | 7384 |
| hs132672683 | CTGAACATAAATCACATGAATGG | 7385 |
| hs132674704 | TGTAAAACAATTTATTCCCAAGG | 7386 |
| hs132672842 | GGCTGTGATATACTTCACATTGG | 7387 |
| hs132672684 | ATCTAGAGAGGAGCAATAGTAGG | 7388 |
| hs132674342 | TGTGAACAATGATTTAAAGTAGG | 7389 |
| hs132674776 | CAGTATTCATGTAGGCTCCCAGG | 7390 |
| hs132673464 | CTGCTTATAGTAATGAATCATGG | 7391 |
| hs132672792 | TGACCAAAATTGGTCACAGATGG | 7392 |
| hs132672894 | TCCTACATCTAGTAAACGTTAGG | 7393 |
| hs132672148 | ATTTCAATAGCTGGAAATGAGGG | 7394 |
| hs132673556 | ACATTCTTCCTCACCTCTATGGG | 7395 |
| hs132672315 | AGCAAGATTTCAAAGATAGCAGG | 7396 |
| hs132674110 | GGTCATTTATATGATATGTCAGG | 7397 |
| hs132673421 | ATACCTACACAACAACTGTAAGG | 7398 |
| hs132672840 | ATTATGTTAACAGCTCCTCTTGG | 7399 |
| hs132674095 | TCACCTATTAACAAATAAGATGG | 7400 |
| hs132673167 | CAGTTTTGATAGAATAAATGAGG | 7401 |
| hs132672826 | GTATATTTATACATTCCAGTTGG | 7402 |
| hs132675004 | TCTGGTCTGAGGAATACTGCTGG | 7403 |
| hs132673795 | ATTTCTTCTACGAAAAGTCCAGG | 7404 |
| hs132672726 | GCCTCTTTATATCGGGGAAGAGG | 7405 |
| hs132674380 | ACTCCTTCTGTGCCCCAATACGG | 7406 |
| hs132674762 | GTGCCCATCTTGTCAATACATGG | 7407 |
| hs132672443 | GGATTTCAAAATATGCCTGATGG | 7408 |
| hs132672449 | AGGACTGCCCTTATACCATCAGG | 7409 |
| hs132674703 | ATACAATTATCAATTACCTTGGG | 7410 |
| hs132673219 | ATATATGATCCTTTTTTCTGAGG | 7411 |
| hs132674745 | GATTACTGGAGTAGAGGCAAGGG | 7412 |
| hs132673505 | AGTTAAGAAGCAGTGGTCTAGGG | 7413 |
| hs132672457 | ACAATTATGTGCCAATTGGAAGG | 7414 |
| hs132673121 | GAGTTGATACCATATAAATTGGG | 7415 |
| hs132673948 | TCAGCAATATGCGGCACACCTGG | 7416 |
| hs132673256 | AGGATTTTGTGTTTAAAAAGGGG | 7417 |
| hs132674101 | ACTGCAATATTAGGAGGCTATGG | 7418 |
| hs132672520 | TGTGTCTTACTCTACATTCAGGG | 7419 |
| hs132672717 | ATTTACACTTGAGTCAACATTGG | 7420 |
| hs132675005 | AGAATGAGTGGGAAGGTCACAGG | 7421 |
| hs132673541 | ATATCTCAAACCATAAATGATGG | 7422 |
| hs132673383 | TAGACATTGTGTTTCTTCCAGGG | 7423 |
| hs132673441 | ACAGAACAAGATCAGAAACTTGG | 7424 |
| hs132674178 | AATGAGCCTCAAAAAATACTAGG | 7425 |
| hs132672464 | GGAAGAAACGAGTGGACCATTGG | 7426 |
| hs132674327 | CCTTCAGTTACACCAACCTTGGG | 7427 |
| hs132673570 | CTTGCCACGTAGGTCCCCAATGG | 7428 |
| hs132672728 | GCCTCTTCCCCGATATAAAGAGG | 7429 |
| hs132674636 | TTCGGGACTTGAATCACAAAAGG | 7430 |
| hs132672599 | GATAAGGAGTCAGGCTCCATAGG | 7431 |
| hs132673435 | TTGTAATGTTACTCATTCATGGG | 7432 |
| hs132673227 | CTCGAATCTCATCTTTTGGAGGG | 7433 |
| hs132672334 | GTTGGCACAACCAAAACCTATGG | 7434 |
| hs132674190 | GAATAATTCATAAATGGAGATGG | 7435 |
| hs132673817 | TGGATAACTGGTGAAAGCCTTGG | 7436 |
| hs132673845 | GAGTTAAACCCTGAATTGTAGGG | 7437 |
| hs132673540 | TTAATAATACATGTAATGCATGG | 7438 |
| hs132673610 | TATCATTATTGTACTCAGGTTGG | 7439 |
| hs132672363 | AAGCATGTTGAAAAGCGTAATGG | 7440 |
| hs132674724 | AATATGTGTGAAGACCAGTTAGG | 7441 |
| hs132673652 | AAACAGAGATTTTTCCCTAACGG | 7442 |
| hs132673142 | TGGATGATGGACTTTACCTAAGG | 7443 |
| hs132675058 | AGAATCTTTGTATCATTGGATGG | 7444 |
| hs132673589 | ATCAGTCTAGTAAATTTGGTAGG | 7445 |
| hs132672051 | TGTCAATTCAAATGGTGCACTGG | 7446 |
| hs132672337 | AGGTTATTGTTTACAACCATAGG | 7447 |
| hs132674384 | TCAAACTACTATTATATCAAGGG | 7448 |
| hs132674872 | GCAGAGTAAGAACTACTGTATGG | 7449 |
| hs132672303 | TGAAGGTTACACCCAGCGACTGG | 7450 |
| hs132672815 | CAGTCAACCTTCTATTTCCACGG | 7451 |
| hs132673245 | AAGAATCATGACTCTTTGAGAGG | 7452 |
| hs132672580 | CTCTCAAATACCTCTCCCTCAGG | 7453 |
| hs132674589 | AAGTTATGCTTCCTTCAGATGGG | 7454 |
| hs132673908 | ACATACAGATGAAGTAAAAGAGG | 7455 |
| hs132673972 | TTAACTGTAAAATAAGATAGAGG | 7456 |
| hs132675409 | AGCTAAAAACAGGGGTAGGAGGG | 7457 |
| hs132674827 | AATCATTTTTAAATAGCCCCAGG | 7458 |
| hs132674525 | TCAAGTAATGGGACTAAGACCGG | 7459 |
| hs132672563 | GTTGCTAATATCTAGTCAAAGGG | 7460 |
| hs132674645 | GCCTGACAAACTGCCCTCAATGG | 7461 |
| hs132675256 | GAATCCGTGTCACCATTCTCAGG | 7462 |
| hs132673559 | AACTGGACTGTTTAATGTGATGG | 7463 |
| hs132673956 | TTATTGCCATAGAGAAATTGAGG | 7464 |
| hs132673978 | CTATTCCACTGCTATGTATGTGG | 7465 |
| hs132672484 | AATGCGTGATGTTCGTCCACTGG | 7466 |
| hs132672261 | TGAGTACTATAAAGTATTTGAGG | 7467 |
| hs132673644 | TGATTGTGAGCCATTTCCATTGG | 7468 |
| hs132674002 | AGTAGGGCAGATATTTGCCCTGG | 7469 |
| hs132673642 | ATTTGTTCATATTAAGACATAGG | 7470 |
| hs132674041 | GTGCTTCTTGAAGAAATCCCTGG | 7471 |
| hs132672504 | TGTGAAGCATTGATGGAGAAAGG | 7472 |
| hs132674475 | GATTTTATGTTAGCCATCACGGG | 7473 |
| hs132672622 | TTGGGGCCAAAACCGTCAATGGG | 7474 |
| hs132674341 | AATTAGTGTTTGAAGATGACAGG | 7475 |
| hs132674689 | GGGTAAGTGTGTGTACTATGAGG | 7476 |
| hs132674226 | GATGCTGTCTTTAGAATTTGGGG | 7477 |
| hs132673553 | TAAGGAAGTGACTTGCTGCCTGG | 7478 |
| hs132675069 | GATATGCAACTTTTACTGACAGG | 7479 |
| hs132673945 | GATTAAGCTAGGAAAGAAAGTGG | 7480 |
| hs132672103 | TTTTCTAGAATTTCAAGATACGG | 7481 |
| hs132672387 | CCATAAAAGCCCTCTTCGCTGGG | 7482 |
| hs132672974 | AAGTGGCTATGGCCAACGTCAGG | 7483 |
| hs132673055 | TCAAGTTTTAATTTTCCCACTGG | 7484 |
| hs132674763 | ACACATACATCCGCATACTAAGG | 7485 |
| hs132675305 | CTTTTAAAATGAGTAGCAGTAGG | 7486 |
| hs132672770 | GGTGATAAACGTTCAGAGGTTGG | 7487 |
| hs132674300 | CTGTGTCACCTCAAATTCTGTGG | 7488 |
| hs132672206 | AGGGAGTGTTTGCTGCTGGTTGG | 7489 |
| hs132672422 | TCTCTCGACATGCCTGTTGTGGG | 7490 |
| hs132672774 | GCACGTGTGCACATGCAAGCTGG | 7491 |
| hs132674257 | ATTTTCCTCTTATTGACTTGAGG | 7492 |
| hs132673278 | GCACTGAACAGGTCATTAGTTGG | 7493 |
| hs132674066 | ACAGTAATGTGCCCGCTTTGAGG | 7494 |
| hs132673502 | GGATCTGTGTGAGATTCTGCTGG | 7495 |
| hs132673554 | GAGAGCTGTGAACAATTGTAAGG | 7496 |
| hs132675298 | TCTTACAGAGAAATCATAACGGG | 7497 |
| hs132672311 | GTTTCTGCCAAGGGACAGGCAGG | 7498 |
| hs132673653 | ATATACATGATTTTCCGTTAGGG | 7499 |
| hs132675081 | TAATAACTAAGGGCTAATAAGGG | 7500 |
| hs132675253 | CAAGAATTAGCTCTGCCTGTTGG | 7501 |
| hs132673578 | TTTGGGTTCTGTATGTACCTAGG | 7502 |
| hs132672293 | CCTTCAACAAAACTAATCTTGGG | 7503 |
| hs132673358 | AAAACTCTGCTTTCCTTCCACGG | 7504 |
| hs132672300 | GTGTAACCTTCAAACACCGCTGG | 7505 |
| hs132673316 | CAAGATGCCTCATAGGTAAGAGG | 7506 |
| hs132673468 | ATATAGTCGAAGACTTTTCAGGG | 7507 |
| hs132672764 | CCCAGAATACCTCAAGAGCTTGG | 7508 |
| hs132672581 | TCAGGTAGAGCTCTACTAGCAGG | 7509 |
| hs132673651 | TATATATGTAGAAATGTACTAGG | 7510 |
| hs132673861 | TTCCTGTTTCTGCTGTTAGAGGG | 7511 |
| hs132674398 | TTTAGTTTGAGCATGTCACTTGG | 7512 |
| hs132674232 | ATACAATCTTTGCCCACTCGTGG | 7513 |
| hs132672469 | ATGCCATCTGGTTTGTCCAATGG | 7514 |
| hs132672501 | TGGAAATTACTTGACATCCATGG | 7515 |
| hs132674203 | TCAGACTGCCTCTAAAATAGAGG | 7516 |
| hs132674378 | TTAGTTTGCTAGGTTTGTAGTGG | 7517 |
| hs132672825 | AGTTGGACCAATTTTTTGAAAGG | 7518 |
| hs132674450 | CTTGTAAACGTAGAAAGAAAAGG | 7519 |
| hs132673604 | TCATTGCATACCATTTAGCTGGG | 7520 |
| hs132674906 | CTTTCCTCAGATTGATCAAGAGG | 7521 |
| hs132675130 | AAAAAGAGAATAAATCTAAGAGG | 7522 |
| hs132672256 | TTAGGTGATCACAGAGTGCCAGG | 7523 |
| hs132672102 | TCTACTATATAAGAAACAATTGG | 7524 |
| hs132673522 | AGGGAAGGTGGTGGTTAAAACGG | 7525 |
| hs132674130 | TATAGATTGGACAATAAGGTTGG | 7526 |
| hs132673411 | TCATTGGCTCATTATCTTCAGGG | 7527 |
| hs132672882 | TAGAAATTGCATATATTCCAGGG | 7528 |
| hs132674943 | TTTTCTGTATAGAATCAGTTGGG | 7529 |
| hs132672709 | GGCTTCCTGACTTTAAGAAAAGG | 7530 |
| hs132674861 | CTAAACCTTACTCAAAATAGTGG | 7531 |
| hs132674986 | GTCATATGACATCGTAAAAGTGG | 7532 |
| hs132673815 | GCTGAAGTAGTGATTGTCCTTGG | 7533 |
| hs132673028 | AAGTAGACTTAGAGAGCCATAGG | 7534 |
| hs132672535 | CCAAATTAGAGAGCATTAGCAGG | 7535 |
| hs132672849 | GATGAAGATTTTAAGTGCCATGG | 7536 |
| hs132673391 | ATAGAAACTATGCTAGGCACAGG | 7537 |
| hs132672783 | AATTTTTTTCAGAATGGGAGGGG | 7538 |
| hs132672989 | ATGAATCAGTGTTTGAAAAGAGG | 7539 |
| hs132675031 | GTTTCTATGTTCATTTTCCTAGG | 7540 |
| hs132673531 | TAGCTATGCCTTCTATATGTAGG | 7541 |
| hs132674373 | ACATCTAAACATTTTTTGGAAGG | 7542 |
| hs132672671 | GCTAATAAAGCCTTCAACTGTGG | 7543 |
| hs132672897 | TTTGGTGTCCTTTATCGTCATGG | 7544 |
| hs132673637 | ATCAATAGTGAGAATTTATGTGG | 7545 |
| hs132672855 | TCTTTAGCATTTTTAAACAATGG | 7546 |
| hs132675361 | GGAAGAGTCTATATATAGAAAGG | 7547 |
| hs132674907 | ATAGCAAAGGTAGTGCTTGAAGG | 7548 |
| hs132674414 | TAGAAGGAAACACCTGAAACCGG | 7549 |
| hs132673944 | ATTAAGCTAGGAAAGAAAGTGGG | 7550 |
| hs132674482 | AGTAGAGCTGACTGAAAGCCTGG | 7551 |
| hs132673037 | AAGAGATAAGACTAAAAGAAAGG | 7552 |
| hs132672572 | TTTTCTCAGTGGCTGGATGAGGG | 7553 |
| hs132675098 | GTTTCCAGCAAGGGTTGCCCAGG | 7554 |
| hs132675181 | CTTTAACAAATCAGCCCCTAGGG | 7555 |
| hs132672674 | CTAAATTTACCTAAATAAAAGGG | 7556 |
| hs132674557 | GCAGCATTATCAATTTATCCAGG | 7557 |
| hs132675079 | ATCCACTTGAAATAAGCAAATGG | 7558 |
| hs132674039 | CAAGAAGCACAGCTACTGTATGG | 7559 |
| hs132674674 | CGCACATTCCCTTTTTCATGAGG | 7560 |
| hs132672048 | TAATATAACTTTCCATTGGAGGG | 7561 |
| hs132675299 | AGAATTGTCTGATTCACAAAAGG | 7562 |
| hs132672344 | CTAAGTTGTAGACCATATCATGG | 7563 |
| hs132675395 | TTAGTTCAGTGAGGTAGAAAGGG | 7564 |
| hs132675210 | CTTCTAACTTTTAGGCCACTGGG | 7565 |
| hs132674447 | AGAAAGAAAAGGTTAGGAAAGGG | 7566 |
| hs132674641 | TGCTGGACTTCTACCATTGAGGG | 7567 |
| hs132672758 | ATAACAAAATTTAATTCTGGTGG | 7568 |
| hs132673376 | AATAAAATAGTATTGAGTGATGG | 7569 |
| hs132674437 | CCAAAGGAGATTCATCTTGTGGG | 7570 |
| hs132674403 | ACATTATTCTTCTCAAGGATGGG | 7571 |
| hs132673804 | CATCATATCAAGTTGCCCATAGG | 7572 |
| hs132672597 | AGATAGTTATACCAAGCCCCTGG | 7573 |
| hs132674055 | TGATTATCTTTAAATGTGACAGG | 7574 |
| hs132674025 | CGAGTGTGCATTTATATATGAGG | 7575 |
| hs132672095 | ACAAAGTTATACAACACATATGG | 7576 |
| hs132674630 | TATCCTCTACGCTTCTTACCTGG | 7577 |
| hs132672529 | CTCTTTTGCAGAATTTTGTAGGG | 7578 |
| hs132675185 | TTATAATTTCTATCTCCCCTAGG | 7579 |
| hs132674207 | TAATGTATTTTTGAAAGCATCGG | 7580 |
| hs132672573 | CTCATCCAGCCACTGAGAAAAGG | 7581 |
| hs132674133 | ATTGATTCTGAAAGATATCAAGG | 7582 |
| hs132674500 | TATTTCTTCTGTTCCAGGATGGG | 7583 |
| hs132675117 | CTGGATCTTATCCTATAAAAGGG | 7584 |
| hs132675468 | TTTAAAATGTGTATGCCCTATGG | 7585 |
| hs132674280 | CCCTTCACTTTCCACATGAAGGG | 7586 |
| hs132674496 | GCCCAGAGCAGAAATTCAAATGG | 7587 |
| hs132674883 | AGGTATTGAAAATTGCATATAGG | 7588 |
| hs132672232 | TTTACAGTTTTACTAAACATTGG | 7589 |
| hs132673303 | ACTGGGATGTGAATGCCAATAGG | 7590 |
| hs132672618 | GAGAAAACACATCCCATTGACGG | 7591 |
| hs132673163 | ATAGAAATGAATCTTTCAAAAGG | 7592 |
| hs132672793 | ATTTTGGTCAATTTTTTCACAGG | 7593 |
| hs132673805 | TCTAGTTTATAAAAGTCATCAGG | 7594 |
| hs132672576 | GGAAGCTATACCAAGAAAATGGG | 7595 |
| hs132674978 | ATTCTGTAGTAGTTACAAGTAGG | 7596 |
| hs132673796 | GCTAAATGTGAATGTCTAGTAGG | 7597 |
| hs132674939 | CCTCAAGAGGCAAGAGTACATGG | 7598 |
| hs132674968 | AAACATTTGGAATCAACTGATGG | 7599 |
| hs132675184 | TATAATTTCTATCTCCCCTAGGG | 7600 |
| hs132675119 | ATTTGCACTCTTCTACCAAAAGG | 7601 |
| hs132674311 | AGATGACTATTCCATGAAGCTGG | 7602 |
| hs132672133 | AATTACTTATTTCTACCTACTGG | 7603 |
| hs132673275 | GTTGGGATTGAGTCAAGAGTTGG | 7604 |
| hs132674882 | ATATGCAATTTTCAATACCTTGG | 7605 |
| hs132673740 | TTTTCCTTTATAACATAATGAGG | 7606 |
| hs132673625 | ACACGTTTGGACATTATTTGAGG | 7607 |
| hs132675158 | CTTGTCACAGAATTTTGCCTTGG | 7608 |
| hs132672808 | AATTTATTATCTTGGTCCATGGG | 7609 |
| hs132674714 | TTGTTGTCTAAGCTGAAGAAAGG | 7610 |
| hs132674293 | ATATTTTTCTGCCTTTGTTGTGG | 7611 |
| hs132674544 | TGCACAAGCATATTTTTGGTTGG | 7612 |
| hs132674892 | TCAGACTAAGAATAAAAAGTAGG | 7613 |
| hs132672913 | AACTGAATTTTTGTACCAGTTGG | 7614 |
| hs132672950 | CTTTGTAGTTTATCAAGAGCAGG | 7615 |
| hs132675249 | CAGGAGTAAAACTTTCCAACAGG | 7616 |
| hs132674455 | GTATCCTAAAGAGTTAATATAGG | 7617 |
| hs132672142 | TTAAAATCATATAATATTGGAGG | 7618 |
| hs132674932 | TGTTGTAGTTGTTAATCAAAGGG | 7619 |
| hs132673535 | ATATTTTGAAATGAGTCTTAGGG | 7620 |
| hs132675416 | CTTCTCCTTTGGATAATGCATGG | 7621 |
| hs132673909 | TAGAGAAGAGGGATGGGCATAGG | 7622 |
| hs132675086 | ACATTTTTATTGGCTGCAAAAGG | 7623 |
| hs132673772 | GAAAATGGTTGTGTATCAAAAGG | 7624 |
| hs132674413 | ATTACTCCTTGAATTGGCTATGG | 7625 |
| hs132672969 | AAGATAAGAATAAATCCAACAGG | 7626 |
| hs132673810 | ACAGATCTACACATAGATAGAGG | 7627 |
| hs132672688 | ATAAATTCTATTTATTGCTAGGG | 7628 |
| hs132672741 | ATAATTAATATAAGATAGACTGG | 7629 |
| hs132675267 | TGACATTTACAAACCCGTTAGGG | 7630 |
| hs132672082 | TTAAGCTAAGATAAATTGTATGG | 7631 |
| hs132673875 | TGACCCATTATTTTATCAAGTGG | 7632 |
| hs132674003 | TTCTCTGTGGCAACAAAGTAGGG | 7633 |
| hs132674521 | TGGAACCCTTGCCCTTTAGCAGG | 7634 |
| hs132675373 | TTTTTTGTGGATATATACATAGG | 7635 |
| hs132674514 | AGGGATGTCTGAAATTCCTTAGG | 7636 |
| hs132672196 | GGGTAGATTGAAACTTTTGTTGG | 7637 |
| hs132674520 | TTAGCAGGCCATTTCTCCTAAGG | 7638 |
| hs132674555 | CGAGCACTGATAAGATTAGCTGG | 7639 |
| hs132674730 | ACTACCTACAGCATTGTGATAGG | 7640 |
| hs132674261 | CTATCTGGTGGTCTTCTCAATGG | 7641 |
| hs132673368 | CTGTGGTTCCCCCAAGATAAGGG | 7642 |
| hs132675240 | ATGTTGGGTTTGATATCAATTGG | 7643 |
| hs132672080 | CATTACCTTGACCTCCTGCCAGG | 7644 |
| hs132674532 | ACGAATTGTTTCTTTCCCTCCGG | 7645 |
| hs132675217 | AGCAATTTCCTCTTCCCTGATGG | 7646 |
| hs132672695 | TCAATGTACAAACTAACTTAGGG | 7647 |
| hs132672816 | GTTGCATCCGTGGAAATAGAAGG | 7648 |
| hs132672445 | AAATATGCCTGATGGTATAAGGG | 7649 |
| hs132675068 | TGACAGGACATAATGAACTTTGG | 7650 |
| hs132674132 | TAGACACTTGAAATATAGATTGG | 7651 |
| hs132673924 | TTACACTGAAAGTTGCTAGAAGG | 7652 |
| hs132674162 | CTTGAATTGAATCAGAGAAATGG | 7653 |
| hs132673287 | CAGCTACCACCCATTCCCTTTGG | 7654 |
| hs132674379 | AGAAATCTACTTAGTTTGCTAGG | 7655 |
| hs132672400 | ATTTGCTCTGAGGCACTCTCAGG | 7656 |
| hs132673333 | TGTCCAGATGAGCTTTAGCTTGG | 7657 |
| hs132673451 | GCAAAGGTAAAAATAATTGTAGG | 7658 |
| hs132674675 | TTTAAAAACCTCATGAAAAAGGG | 7659 |
| hs132672508 | ATCATCATATTTGTGTTACATGG | 7660 |
| hs132674016 | TCAGGTTTACTTGCAAGGAATGG | 7661 |
| hs132674796 | ATTTTTGTGGGTACATACTAGGG | 7662 |
| hs132674653 | ATACCAGAATTAGAGTATATCGG | 7663 |
| hs132673347 | ACCAGAAAGAGTACAAATAAGGG | 7664 |
| hs132673030 | AGAGTGTCTTCCTAGGCAATAGG | 7665 |
| hs132673123 | GCAAAAGCCTATAGACATACAGG | 7666 |
| hs132674361 | TCTAACCTAAATGTATTTGAGGG | 7667 |
| hs132673155 | TCCAATTCTGTTCTGCAGACGGG | 7668 |
| hs132673536 | TTGAAATGAGTCTTAGGGCTAGG | 7669 |
| hs132672742 | TTAATATAAGATAGACTGGTTGG | 7670 |
| hs132673848 | TTAACAAGTTATATGATTCAGGG | 7671 |
| hs132674258 | AATTACCTCAAGTCAATAAGAGG | 7672 |
| hs132672433 | TATGTTAGCGAGGAAGATAAGGG | 7673 |
| hs132675293 | TCTCTGAGTTTCAAACAGATTGG | 7674 |
| hs132674742 | TCATATATAACTCAATATACCGG | 7675 |
| hs132675443 | TTGCCATGCCAATTTTGAAATGG | 7676 |
| hs132673011 | GCTCTATATGACCATGGTCCAGG | 7677 |
| hs132674458 | GTTAATATAGGATGTAATATAGG | 7678 |
| hs132673230 | GTCTGTACCTACCCAGATATAGG | 7679 |
| hs132672701 | GATTAGTAAGAACCTTTCTCAGG | 7680 |
| hs132672071 | GTAGCAAATGAATCTTTTGAAGG | 7681 |
| hs132673608 | TGGCTGTTAAAAAGTCATAAAGG | 7682 |
| hs132674405 | GTATTTTTATCTTTTTGACTTGG | 7683 |
| hs132672258 | GAGTTTCTTAACAAATACTTAGG | 7684 |
| hs132672517 | AATGAACCTTTATTCCCAAAAGG | 7685 |
| hs132674517 | AGGAGAAATGGCCTGCTAAAGGG | 7686 |
| hs132674215 | GAGATTTACAGACACATAGTAGG | 7687 |
| hs132674206 | AGAAAATTTTGTAATGAGGTGGG | 7688 |
| hs132673630 | AGCAAATCTTGGCTTTAGCCAGG | 7689 |
| hs132673127 | CTAGAGCTCAAGTGAAATATGGG | 7690 |
| hs132672868 | GTAAAGACTCTAATATATAAGGG | 7691 |
| hs132672416 | CACTAACTTGACATAACAAATGG | 7692 |
| hs132673723 | CCCTTCAAAGCCTTTCCTTACGG | 7693 |
| hs132674914 | TAAAAAATATGGAATATTAAGGG | 7694 |
| hs132674021 | CCTTTTGATCTAGCTATCCTGGG | 7695 |
| hs132674859 | ACTTTTGCTTATGTTAGCTCAGG | 7696 |
| hs132674426 | TTACCATTTCAAATTATGAATGG | 7697 |
| hs132673646 | GCGTCTGTTTTTTCATCCAATGG | 7698 |
| hs132675413 | GTGTATAGAAGCAATAAAAAGGG | 7699 |
| hs132673880 | TTAACTGTCAGTGGTCATAAAGG | 7700 |
| hs132675447 | ATAACTTTGACTCTTATCTCTGG | 7701 |
| hs132673332 | GTCCAGATGAGCTTTAGCTTGGG | 7702 |
| hs132673042 | GGAATCTTTAATATAGGTAGTGG | 7703 |
| hs132673745 | GCTCAACTTTTTTTTTGTATGGG | 7704 |
| hs132674953 | GTTAACTGAGAAAGAGTAGAGGG | 7705 |
| hs132672968 | CTTCAGTGAGAACTTCCTGTTGG | 7706 |
| hs132672672 | CATGTCTCTAGAGATAGAATAGG | 7707 |
| hs132674810 | GTGCAGACATGGTTGATTCATGG | 7708 |
| hs132675341 | CAATTCTTGCCATTGTGTTAGGG | 7709 |
| hs132672092 | AAATGAATAAAACAATAAAACGG | 7710 |
| hs132673993 | GGAGACATAAGTATGTGAAATGG | 7711 |
| hs132672546 | TGCTAAGCGTCTGCATACCTGGG | 7712 |
| hs132675386 | AGAGCATACACCCCAATAATGGG | 7713 |
| hs132674452 | ATAGAGGTAGACGTTTTAAAGGG | 7714 |
| hs132672604 | CTGATCTTGGATTGACCAGATGG | 7715 |
| hs132674153 | AACCTCAACTTAAACCCAAATGG | 7716 |
| hs132673508 | TTTGCGCAACAATTTTCAAATGG | 7717 |
| hs132673532 | ATTCAAAGCCTACATATAGAAGG | 7718 |
| hs132672110 | TGTATAACACAGCAGTGAATAGG | 7719 |
| hs132672047 | TATTAACATGTCAATTCAAATGG | 7720 |
| hs132672302 | ACACCCAGCGACTGGCTAATCGG | 7721 |
| hs132674263 | AAGCTGATAGTTCCTAACTATGG | 7722 |
| hs132674731 | GTGATAGGCCAGCAGTACTATGG | 7723 |
| hs132675308 | GCCTGAGGTTTAGTTTTAAGTGG | 7724 |
| hs132672162 | AGTGAAAACTAAGATGAAACTGG | 7725 |
| hs132673061 | ACCAACAGCAACAACAAAAGGGG | 7726 |
| hs132673882 | TTATGACCACTGACAGTTAAGGG | 7727 |
| hs132674727 | AGGAAGTCACCACCAATAACAGG | 7728 |
| hs132674419 | AGTTCTATCTTCTTCTGTACCGG | 7729 |
| hs132675113 | CTAGAAGTCTAAACAAATGCTGG | 7730 |
| hs132673906 | TTACATGTCTGTTTTGTTTGTGG | 7731 |
| hs132672738 | ATAAGTTGAGATATACTTTGAGG | 7732 |
| hs132673169 | AGGCAGAAGACAGCTTTTAAGGG | 7733 |
| hs132673562 | AACAGAACCTTTTCTCCCATTGG | 7734 |
| hs132672753 | GTTTAAACTTTGCAATACTAAGG | 7735 |
| hs132674963 | CATTAAATAATTAAAGTAGAAGG | 7736 |
| hs132674603 | TTAAGGAAAGAGCTATCTTAAGG | 7737 |
| hs132672740 | TTTCAATTCATCAGATTATGTGG | 7738 |
| hs132673009 | TTATTACATAGTCAGTACTATGG | 7739 |
| hs132674388 | GAAAGATGCATAACAACAATTGG | 7740 |
| hs132673992 | CACTACCTTCTATTAAAAAGAGG | 7741 |
| hs132672992 | TTAAAGATAGATTGGGGGGGTGG | 7742 |
| hs132673558 | TCACCTCTATGGGTACTAACTGG | 7743 |
| hs132673761 | ACAGGAATATTTGCTCTTTGAGG | 7744 |
| hs132674510 | TGTGCGAGTGTATCTTTCTAGGG | 7745 |
| hs132672217 | AATCTAAGAACATTTCAGATTGG | 7746 |
| hs132674825 | GAACTCATCTGTGTGTTTAGAGG | 7747 |
| hs132675047 | CCGTTGTCCTAGCAGCTATATGG | 7748 |
| hs132674367 | ATATTGCATGCGCTAATCATAGG | 7749 |
| hs132674599 | TTACATGTCTAAATACCAATTGG | 7750 |
| hs132673161 | GATATGGATATACTTATAGATGG | 7751 |
| hs132675264 | GATTAAAACCAAACCCTAACGGG | 7752 |
| hs132674541 | ACATCAGTGGTTTAGTTTTGAGG | 7753 |
| hs132673482 | TGGTCCTGTTCTCTGGGTAATGG | 7754 |
| hs132672537 | ACTTTGTCATCATCACTCATAGG | 7755 |
| hs132672623 | CTTGGGGCCAAAACCGTCAATGG | 7756 |
| hs132674691 | AAGCAATACACACTACATATCGG | 7757 |
| hs132673331 | GGACAATCACAAGGGTTTAGAGG | 7758 |
| hs132672470 | CATCAGTGTTGTATGCCATCTGG | 7759 |
| hs132672404 | TGCCGTGTGCCCTAATCAACAGG | 7760 |
| hs132674989 | ACTATCATGAACCAGCCTTCAGG | 7761 |
| hs132672658 | GTCATTCTGCAGTCCATCATAGG | 7762 |
| hs132674667 | GCAGTAAAATCAATAATAAAGGG | 7763 |
| hs132675428 | GATTTCATCAATTCCAAAACAGG | 7764 |
| hs132674412 | CCAATTCAAGGAGTAATAGAAGG | 7765 |
| hs132672188 | TAGCACATAACTTTGTATATAGG | 7766 |
| hs132675335 | GCATGAATCACGAATTTTGCTGG | 7767 |
| hs132675017 | TTTCCCTACAGGAGTATAAAGGG | 7768 |
| hs132674916 | GTATTTCACATGCAGTTTGTTGG | 7769 |
| hs132672458 | AATTACAATTATGTGCCAATTGG | 7770 |
| hs132672314 | TTCCATTCCTGCCTGTCCCTTGG | 7771 |
| hs132673226 | CCTCGAATCTCATCTTTTGGAGG | 7772 |
| hs132672335 | TTTTGGTTGTGCCAACATATAGG | 7773 |
| hs132672477 | CATACGCAACATCAGAATAAGGG | 7774 |
| hs132672763 | ATAACTGCACACCAAGCATTTGG | 7775 |
| hs132673663 | TGATTTACTTCTAAAATAAGTGG | 7776 |
| hs132673748 | AGGAAAAAAAACACAAAAAACGG | 7777 |
| hs132675257 | CACGGATTCTATTTTCTGCTTGG | 7778 |
| hs132672255 | GATCACAGAGTGCCAGGAATTGG | 7779 |
| hs132675262 | TTATTTTGACTTCCTGAGAATGG | 7780 |
| hs132673843 | AAGAAATTCCCTACAATTCAGGG | 7781 |
| hs132674354 | ATTCCTCTAGTATTGCTATTCGG | 7782 |
| hs132672663 | TTTTGTGTTGGTAAATTTGTCGG | 7783 |
| hs132674503 | GGAAAAACACATTAAATGATAGG | 7784 |
| hs132673040 | TAGTTACTAATATTTTTCATAGG | 7785 |
| hs132673962 | ATGAATTTCATACTGACTACTGG | 7786 |
| hs132673897 | CCAGAACAATGAGACCAAATAGG | 7787 |
| hs132672455 | GGCACATAATTGTAATTCATAGG | 7788 |
| hs132674856 | GGTGTCCCCCCACCATCCTTAGG | 7789 |
| hs132674425 | TGGCCATTCATAATTTGAAATGG | 7790 |
| hs132675161 | AATATATTAAAAACATCTATTGG | 7791 |
| hs132675277 | TTTCATATCCTAAATGGAAATGG | 7792 |
| hs132673563 | ACAGAACCTTTTCTCCCATTGGG | 7793 |
| hs132672528 | TCTGCAAAAGAGATTCAGTTTGG | 7794 |
| hs132672954 | AATGACTTCAGCCTGCTTTGTGG | 7795 |
| hs132675368 | TGAAGTTTGAGACAGTAAAATGG | 7796 |
| hs132673573 | GTATGTACCTAGGACCTAATGGG | 7797 |
| hs132672598 | TCATAGCTCCAGTCCCCATATGG | 7798 |
| hs132672984 | TTAATGTAGCACTTCAGCTTTGG | 7799 |
| hs132673614 | AGAGAGCAGGGGAAGAAAACAGG | 7800 |
| hs132674936 | CAGTGAGGTGAATTTATTAAGGG | 7801 |
| hs132675314 | GGAAGTCATTGAAACCTTGTAGG | 7802 |
| hs132673873 | CATCCACTTGATAAAATAATGGG | 7803 |
| hs132674720 | GCTTGTTAATGTTAATTCCTTGG | 7804 |
| hs132674286 | ATTTGCTTCCCCCTCTTCAATGG | 7805 |
| hs132674838 | CGTTTCTATAGCTCTCAAAAAGG | 7806 |
| hs132672544 | GCTATGCTTCCAAAGTTCTAAGG | 7807 |
| hs132674679 | TTACTATTCAAGATATTCTTGGG | 7808 |
| hs132672785 | TAGAAGACAATGCATTTTAACGG | 7809 |
| hs132673483 | GTAATGGAGTAAAATGTTACTGG | 7810 |
| hs132672790 | TTTTTTCACAGGCATTTAATGGG | 7811 |
| hs132673187 | TGGAAAGGTGTATACTACTATGG | 7812 |
| hs132675137 | TGTCATTTAAATCTTATAAGAGG | 7813 |
| hs132672961 | TAACTATCACATTTTCTCATAGG | 7814 |
| hs132674956 | CAGTTAACTCTAAAATTAGATGG | 7815 |
| hs132675259 | TCTCAGGAAGTCAAAATAAAGGG | 7816 |
| hs132672687 | GATAAATTCTATTTATTGCTAGG | 7817 |
| hs132674642 | CAGCAGTGCTCATTTCTATAGGG | 7818 |
| hs132674440 | ATATTAGTAGTTGGGCCAATAGG | 7819 |
| hs132673538 | GCATTACATGTATTATTAAAGGG | 7820 |
| hs132673440 | AGTTTTATAGAGCATTTGTATGG | 7821 |
| hs132672454 | TTTCCTGATTTCCTTCCAATTGG | 7822 |
| hs132673645 | GTTTTTTCATCCAATGGAAATGG | 7823 |
| hs132673041 | GAGTTTGGAATCTTTAATATAGG | 7824 |
| hs132673574 | TGTATGTACCTAGGACCTAATGG | 7825 |
| hs132674018 | CATATATTGATGTTGCATATAGG | 7826 |
| hs132674180 | CAAAAAAGTAGCCATTTAAAGGG | 7827 |
| hs132674353 | TTAAATTCTACATTCTCTGCTGG | 7828 |
| hs132674166 | CGCATTATAGGCATAGTAATAGG | 7829 |
| hs132674408 | AGTGCTCTATATAAATATATTGG | 7830 |
| hs132673990 | TTTATTATCTAATTGATCCTTGG | 7831 |
| hs132675404 | TCTCCCTTAGAGCTAAAAACAGG | 7832 |
| hs132672313 | CCTGTCCCTTGGCAGAAACTTGG | 7833 |
| hs132672694 | TTCAATGTACAAACTAACTTAGG | 7834 |
| hs132674552 | GGCCTCACGCCCTATAAAACTGG | 7835 |
| hs132675300 | TGTTTATGCTCATAGATAATAGG | 7836 |
| hs132673125 | ACAGCTTCCTGTATGTCTATAGG | 7837 |
| hs132675138 | ACTATTTTACAACAATATTTGGG | 7838 |
| hs132673309 | CTTGTTCTCATGGAATCCTTAGG | 7839 |
| hs132672461 | ATAAAACGTGATTAATTGCTTGG | 7840 |
| hs132675014 | CTAGAGGCAGGCAAAATAACTGG | 7841 |
| hs132672675 | GTAAATTTAGTACACAATTAGGG | 7842 |
| hs132674332 | ACATGGTGGGAAGCAATAAAAGG | 7843 |
| hs132675448 | TTTCTGCTTCTTTAGTTGATAGG | 7844 |
| hs132672982 | GTGCCTCAAGACTAAATATTGGG | 7845 |
| hs132672468 | GGTCCACTCGTTTCTTCCTTAGG | 7846 |
| hs132674338 | TGTTCTTTCTAAACAAAATCCGG | 7847 |
| hs132673395 | ATAGTTTCTATATATTTATTAGG | 7848 |
| hs132673654 | AATATACATGATTTTCCGTTAGG | 7849 |
| hs132673600 | ATTCCTGCCAAATTATTTCATGG | 7850 |
| hs132672368 | TAGAGCATAACAGGGAAAAAAGG | 7851 |
| hs132673474 | ATTTGCAGATTTGGTGAAAATGG | 7852 |
| hs132673492 | TTACTCAAAGACGTTCTATCTGG | 7853 |
| hs132674865 | AAGGAACTATAGAAAAAGTTAGG | 7854 |
| hs132675219 | ATATTACTTTGTCATCAAAAAGG | 7855 |
| hs132674871 | ATGTCCAACTAATAAAATTAGGG | 7856 |
| hs132675456 | TCTGTTGTAATTTTTCACTCTGG | 7857 |
| hs132674050 | AGACTCAGTCCCCAGAAAAATGG | 7858 |
| hs132673378 | TATTTAGTTGTATAAGTAATGGG | 7859 |
| hs132672655 | ATACTTTGTATATTCATTGTAGG | 7860 |
| hs132673977 | GTATAATATAAACACAAAATAGG | 7861 |
| hs132672854 | TTACTGATGTAATTTATAACAGG | 7862 |
| hs132675023 | CTAAAGTTATGTCAAATAACTGG | 7863 |
| hs132672880 | GAATATATGCAATTTCTAATAGG | 7864 |
| hs132673247 | GCAACAGCGCTGACATTTCTAGG | 7865 |
| hs132674873 | GCTTCCCTAATTTTATTAGTTGG | 7866 |
| hs132673602 | ATTCTGTCTCCCCAGCTAAATGG | 7867 |
| hs132673686 | CTCACTCTCCCAAGTCAATATGG | 7868 |
| hs132672707 | TTACTTTTGCTTTTACTGATAGG | 7869 |
| hs132674715 | GTAAGATCAAGGAAAATATTAGG | 7870 |
| hs132674593 | CGCAGTTTTCCAAAAGAAATCGG | 7871 |
| hs132672828 | CTAAACGAGGTGAATAAAATAGG | 7872 |
| hs132672666 | AGAATATTACAATAATATTAAGG | 7873 |
| hs132674755 | GTATGTCTGGGGTAGAAATTTGG | 7874 |
| hs132675474 | GACTACCACTGCTTTTAGTATGG | 7875 |
| hs132672489 | TATCTTTGTAATTTGAAAATGGG | 7876 |
| hs132675075 | CTGATATTAATGCCATAAATAGG | 7877 |
| hs132674661 | TATTTCATCATTCCACTGATAGG | 7878 |
| hs132673619 | TTAGAATTTTCCTAAGGAAATGG | 7879 |
| hs132672659 | TAGGTTTTATTACTGTTTAATGG | 7880 |
| hs132674220 | GTCAAAGTCAATTTACATAATGG | 7881 |
| hs132673060 | CACCAACAGCAACAACAAAAGGG | 7882 |
| hs132672731 | ACTAGAGAAGGTAGGCAAATAGG | 7883 |
| hs132674308 | TGAAATATAAACCAGCTTCATGG | 7884 |
| hs132672570 | TCTTTCCTTTTCTCAGTGGCTGG | 7885 |
| hs132674524 | TACCCCTTCTTTCAAGTAATGGG | 7886 |
| hs132672821 | TCAAATATAATACATTTAAATGG | 7887 |
| hs132675016 | TTTTCCCTACAGGAGTATAAAGG | 7888 |
| hs132674660 | AATTTAGTCAAATTTATTACAGG | 7889 |
| hs132675222 | GCACTTACATGAATGAAAAATGG | 7890 |
| hs132675155 | GATGGTAAATGAGAATAAAATGG | 7891 |
| hs132675225 | AGGTGTTCCTTCTCTATATACGG | 7892 |
| hs132673953 | GCCTTACCTCAATTTCTCTATGG | 7893 |
| hs132672690 | CTATATTTGTATTATTTTAGAGG | 7894 |
| hs132672648 | ACAAATATCTTCTTATTATGAGG | 7895 |
| hs132673397 | GTCCTCATAAACACACAAAATGG | 7896 |
| hs132673994 | TGTCTCCTCTTTTTAATAGAAGG | 7897 |
| hs132672360 | TGTTTCTCCTGGATAAATATAGG | 7898 |
| hs132674249 | AGGAATGTCAGTAAATTTAATGG | 7899 |
| hs132675049 | GCAGCTATATGGAGCACATTTGG | 7900 |
| hs132674643 | CCAGCAGTGCTCATTTCTATAGG | 7901 |
| hs132675218 | TCATCTGTATCATACCTATTTGG | 7902 |
| hs132673365 | TCTCAGTAGAACATTAAAAATGG | 7903 |
| hs132673749 | GAACATGACTAAAATCTTAAAGG | 7904 |
| hs132673958 | TTTAGCTTAGTTCTTCTGTTTGG | 7905 |
| hs132673957 | AACAGAAGAACTAAGCTAAATGG | 7906 |
| hs132673080 | ACTTTGTGTTCAAGGTAAAATGG | 7907 |
| hs132673890 | GGAGCAAAACGACCACAAATAGG | 7908 |
| hs132672985 | AAGCTGAAGTGCTACATTAATGG | 7909 |
| hs132673629 | AGATTTGCTGAAGGCTTTTAGGG | 7910 |
| hs132675376 | CCACATCATAATCAGAAAATAGG | 7911 |
| hs132673606 | TTTCTAGATAACTATTAAAATGG | 7912 |
| hs132673872 | CCATCCACTTGATAAAATAATGG | 7913 |
| hs132674201 | AATAGTCTGACACTCTAAATTGG | 7914 |
| hs132675460 | TCATTCATATACTCTATAAAAGG | 7915 |
| hs132673108 | CCTTTTGGTCAGGTGCAATTAGG | 7916 |
| hs132673976 | AATAAATCTGCATTGAAAAATGG | 7917 |
| hs132673307 | TCTGATGTATTTTATCCTATTGG | 7918 |
| hs132675466 | ATAGGGCATACACATTTTAAAGG | 7919 |
| hs132673244 | CACATCGCTTTATTGTAAAATGG | 7920 |
| hs132672052 | AATTAAACAAATACACAAAATGG | 7921 |
| hs132672356 | TGAGAAGCATTGTTACTAAATGG | 7922 |
| hs132674362 | TAGCGCCCTCAAATACATTTAGG | 7923 |
| hs132673171 | TTAAGGGATTAAGGAGAAAATGG | 7924 |
| hs132673800 | TTACACTCTCTGAATGCTTTTGG | 7925 |
| hs132672494 | TGGCTTCCACCATTGTAATTAGG | 7926 |
| hs132672338 | CATTGATGTGATATTCTAAAAGG | 7927 |
| hs132673819 | CCAGTTATCCAGAAGATTAAAGG | 7928 |
| hs132674543 | GCATGAAAGCTGATGTTTTATGG | 7929 |
| hs132674097 | ATGCCATCTTATTTGTTAATAGG | 7930 |
| hs132675458 | ATAGAGTATATGAATGAAATTGG | 7931 |
| hs132672577 | TGGAAGCTATACCAAGAAAATGG | 7932 |
| hs132674113 | CTTGACATCTTTGTATTAATAGG | 7933 |
| hs132672713 | TTATTGCTCTTTAAAATATATGG | 7934 |
| hs132672438 | TCATGTGACATAAATTTAATTGG | 7935 |
| hs132675118 | TGTGAGATATGCCCTTTTATAGG | 7936 |
| hs132674167 | TGCGGAGTAGTTTTGTTTAATGG | 7937 |
| hs132674547 | ATAAAATGAATGAAGCTAAATGG | 7938 |
| hs132675279 | GTAGAAAGCCATTTCCATTTAGG | 7939 |
| hs132674912 | GCAAAGATATTATCATTTAATGG | 7940 |
| hs132674977 | TTTTCTTTGCATTAACTAAAAGG | 7941 |
| hs132672823 | AGGAAATCCTTTCAAAAAATTGG | 7942 |
| hs132673598 | TGACAAACCATGAAATAATTTGG | 7943 |
| hs132672134 | TTATATTCAAAGTATTTTAATGG | 7944 |
| hs132672138 | TTAAAATGTGTTCCTCTAATTGG | 7945 |
| hs132672490 | GTATCTTTGTAATTTGAAAATGG | 7946 |
| hs132675085 | CCAATGAAAGACATTTTTATTGG | 7947 |
| hs132671958 | AAAACCATAAGTAACCCGAAAGG | 7948 |
| hs132671949 | ATCACGGTCAGTCTAGCACAGGG | 7949 |
| hs132671973 | GAGCATGCTATTTAGCCATGAGG | 7950 |
| hs132671959 | GAAAGGACTACTTTCCAACATGG | 7951 |
| hs132671995 | GTTTGTGCCTGAGAAAGCATAGG | 7952 |
| hs132671948 | ATCTGCAGAGAAGGGTTTGGGGG | 7953 |
| hs132671985 | AATTCATCAGGTCCATACCCTGG | 7954 |
| hs132671944 | TGACCGTGATCTGCAGAGAAGGG | 7955 |
| hs132671968 | GAAGGCACTTAATATCATGTTGG | 7956 |
| hs132671977 | ACTCCAACATTTATATGGGATGG | 7957 |
| hs132672008 | TTTCATTGTGTGTTACACAATGG | 7958 |
| hs132671989 | GAAATTTTTAGTCCTTTCCAGGG | 7959 |
| hs132671950 | GATCACGGTCAGTCTAGCACAGG | 7960 |
| hs132671979 | TGGGATGGTACTCTTCAATCCGG | 7961 |
| hs132671980 | GTACCATCCCATATAAATGTTGG | 7962 |
| hs132671955 | GGGGGAGTGGATAGAGAGGAGGG | 7963 |
| hs132671999 | TTCTTTCTCTCAACAGTGGGTGG | 7964 |
| hs132671993 | TGAATGTGTGGAGAGCTCTTAGG | 7965 |
| hs132672002 | GTGGGGTTCTTCCATGACATTGG | 7966 |
| hs132672004 | ATAATTGTATAGAATTTAGTGGG | 7967 |
| hs132672011 | ATTCATATGTACCATATCATAGG | 7968 |
| hs132671982 | TTATGGATGCCTGTTTTTGCCGG | 7969 |
| hs132671946 | TGATCTGCAGAGAAGGGTTTGGG | 7970 |
| hs132671966 | ATATAAATGATATTCGAAATTGG | 7971 |
| hs132672010 | TGTTCTATATTCCTATGATATGG | 7972 |
| hs132670257 | CAGACACTGATATCACACTGAGG | 7973 |
| hs132671162 | TCTCACAAGTAAGCTCACTGGGG | 7974 |
| hs132670891 | CAAAACCTAAGCAAACCCTGGGG | 7975 |
| hs132671289 | TAATTGGAGTTATTCCACAGGGG | 7976 |
| hs132670076 | GAAGCCAAGTAATAGAGACGGGG | 7977 |
| hs132670047 | GCATCAGTAAGAAAACAAGGAGG | 7978 |
| hs132670717 | ACATATGAGTGTATACACTGAGG | 7979 |
| hs132670065 | GTGTGTAAGAGCAAGCAAGGAGG | 7980 |
| hs132670299 | GTACTGTGCTGTTAGGCACGGGG | 7981 |
| hs132670673 | TGGGCACTATAAATATGACAAGG | 7982 |
| hs132671813 | TATAAGAGGAGAGAGCCATGTGG | 7983 |
| hs132670286 | GTGGCACTAACAAAAACACAAGG | 7984 |
| hs132670256 | TCAGCAACGTAATGAAGACGAGG | 7985 |
| hs132671620 | AAGAAATATTTACAACAACGTGG | 7986 |
| hs132670703 | GCATAAGATGGAAATCCTAGGGG | 7987 |
| hs132670134 | ATGTAGCACATACACACCAGGGG | 7988 |
| hs132670885 | ATGTGTACTTCTAAACAGTGAGG | 7989 |
| hs132671421 | GAGACAGTGAACCAAGCATGGGG | 7990 |
| hs132671501 | TGAGAAATAAGATTAGCCCGTGG | 7991 |
| hs132671040 | AATTTGGAGCCTGATATGAGTGG | 7992 |
| hs132671843 | GAGCGATGCCTTAATGAAGGTGG | 7993 |
| hs132670086 | ATACACTCAAGTGACAGGAGAGG | 7994 |
| hs132671001 | CACATGTTACTGCTCCAATGTGG | 7995 |
| hs132670117 | ACGGGGCCCCCTAACAAACAGGG | 7996 |
| hs132670111 | CATAGGCATACTATTTACGGAGG | 7997 |
| hs132671519 | GTAATGATGCCAATGATGAGAGG | 7998 |
| hs132671541 | ATACATGTGTTAAATCCATGTGG | 7999 |
| hs132671899 | ACATTGCCGAGAATATGACCTGG | 8000 |
| hs132671280 | AATATTGCTAGGTATGCTAGGGG | 8001 |
| hs132670768 | GATTATGGGAAACTGGAAGGAGG | 8002 |
| hs132671810 | ATAGGGGACAGTCACCCACATGG | 8003 |
| hs132671595 | GGTGTTTAAGCAGGTCAGGGCGG | 8004 |
| hs132670784 | GTGCTGCAAATGAATTGAGGAGG | 8005 |
| hs132671078 | AAGTGAATATATGCTATGAAGGG | 8006 |
| hs132670663 | AATTGATGAGATATATACTGAGG | 8007 |
| hs132670833 | GGTTGAAGGACACATTGTGGAGG | 8008 |
| hs132671580 | AGGTGAGCTAAGCATTACACAGG | 8009 |
| hs132670181 | GACTTAAGAAGGTAATCTTGGGG | 8010 |
| hs132671317 | GTGAGTAAAATTGATTGACGTGG | 8011 |
| hs132670023 | CCACTGGCATTATCAAACACAGG | 8012 |
| hs132670929 | ATACATCAGGTTGACCTGGGAGG | 8013 |
| hs132671611 | GATACCAGAGATAGGTCCAGAGG | 8014 |
| hs132670842 | GTAGGGCATATGGTTAGGGGAGG | 8015 |
| hs132671628 | TATCACATAGAGTGTTAGAGGGG | 8016 |
| hs132671357 | ACTCCCGTCTCAAATATAAGGGG | 8017 |
| hs132670211 | GATGATAAAAACATATTTTGGGG | 8018 |
| hs132671854 | AATAAAGTGATAATGAGAGGGGG | 8019 |
| hs132670669 | AACAGAAGTAGGGAAAGAGGGGG | 8020 |
| hs132671313 | ATACTATTTTGTTTACTGGGGGG | 8021 |
| hs132670672 | TCTTAGAGTGTATTGGACGTGGG | 8022 |
| hs132670337 | TTACAAACACCCTAAAAGGGGGG | 8023 |
| hs132670024 | CCTGTGTTTGATAATGCCAGTGG | 8024 |
| hs132671832 | GCACAAATCACAAGAGATGGGGG | 8025 |
| hs132670136 | AATGTAGCACATACACACCAGGG | 8026 |
| hs132671255 | TGACTGTGAGAGAATGAGGGAGG | 8027 |
| hs132670449 | AGGGAGAGAAATCCCTATGGGGG | 8028 |
| hs132671610 | TAGGTCCAGAGGTATTGCTGTGG | 8029 |
| hs132671636 | ACATGAATAGAATAATTCAGAGG | 8030 |
| hs132670977 | ACTTATGCATGGGATTGGGGAGG | 8031 |
| hs132671759 | GCATGAGGGAAGACAGCAGGAGG | 8032 |
| hs132670115 | AAATATTGCAAGCAAGCACGGGG | 8033 |
| hs132671794 | AAGACACAGAATAGTCAGAGAGG | 8034 |
| hs132670869 | ATAGTGGGAAGCTTGATTGGTGG | 8035 |
| hs132670689 | TGTGTGACACGATAAATTGGAGG | 8036 |
| hs132671459 | AATAAGTCATTATTACTCAGTGG | 8037 |
| hs132670278 | GTATCATACGTACACATATGGGG | 8038 |
| hs132671898 | TCTATATGAGGAAGACTCAGTGG | 8039 |
| hs132671746 | ATATATAGCAGTTACTACAGTGG | 8040 |
| hs132671923 | AAACAAACCAGCTCTTCACGAGG | 8041 |
| hs132671092 | CTATGTACTTTGCTTCAGGGAGG | 8042 |
| hs132671037 | GTTATAAGCCACAGGCAGAGAGG | 8043 |
| hs132670418 | GCATTCGGGAAACTTTAAGTCGG | 8044 |
| hs132671546 | GCTGCCAGAATTCTATAGCAGGG | 8045 |
| hs132671080 | GCAATGTTGGATATTCAAAGAGG | 8046 |
| hs132671838 | ATTTGGTAATATTTACACAAAGG | 8047 |
| hs132671853 | CAATAAAGTGATAATGAGAGGGG | 8048 |
| hs132670862 | TCTAGTGCATAAAGAACCTGAGG | 8049 |
| hs132670336 | CTTACAAACACCCTAAAAGGGGG | 8050 |
| hs132670857 | GCTATAATTTATGGTCCCAGAGG | 8051 |
| hs132671328 | CTTACTCTACTCAGTGCCTGAGG | 8052 |
| hs132670175 | TATCAAAGTCAGCATTAAGGGGG | 8053 |
| hs132671822 | AGAGCAGGTACAGCCTGTAGGGG | 8054 |
| hs132670613 | CAATATTTTTGACAGTACAGAGG | 8055 |
| hs132671688 | AGAAAGTAATTGGCAAACAGAGG | 8056 |
| hs132670145 | TTAAGTCCTTCGAGATGACAAGG | 8057 |
| hs132671627 | AACACTCTATGTGATAGTGGAGG | 8058 |
| hs132670126 | AGAACAACAGAAGCTGTTTGGGG | 8059 |
| hs132671398 | GTAACTCTTCTATTACGATGAGG | 8060 |
| hs132670901 | ATATATACTCAGCTACAAGTGGG | 8061 |
| hs132670167 | ATTGCCTTACTGTTAGACAAGGG | 8062 |
| hs132671306 | TCAAAGATCTCTAAAGATGGGGG | 8063 |
| hs132671381 | CTTGAACAGAGCTTTTTACGAGG | 8064 |
| hs132670150 | ACTATGCCTTGTCATCTCGAAGG | 8065 |
| hs132671339 | AGAGACAGCAAACAATGTTGAGG | 8066 |
| hs132671093 | GTACATAGCAGTATCCCACTTGG | 8067 |
| hs132670415 | ATCATGCTGCATAAAACCAGTGG | 8068 |
| hs132670902 | ATACTCAGCTACAAGTGGGTCGG | 8069 |
| hs132670776 | GTATACTTGTGTGCTGTGAGAGG | 8070 |
| hs132671875 | AGTAAACTAGCCAAGGATGGAGG | 8071 |
| hs132670186 | TTGCTCTTACACATTTTTGGGGG | 8072 |
| hs132671693 | GAGGGACAAGTTGTGCCAGGAGG | 8073 |
| hs132671733 | TCAAACGACAGTAAAAGTGAAGG | 8074 |
| hs132671809 | CATGCACGTGTTTTCCATAGGGG | 8075 |
| hs132670629 | GGATATCTATCCTTGCCTTGAGG | 8076 |
| hs132671397 | ATAAAAGAATGAGTAATACAAGG | 8077 |
| hs132671288 | ATAATTGGAGTTATTCCACAGGG | 8078 |
| hs132670760 | AATTTTGATGATACACTCTGTGG | 8079 |
| hs132671722 | GCTCTTAAAAGTAGATGTAGGGG | 8080 |
| hs132671105 | GAGTTTCCAAGATCTGCTGAGGG | 8081 |
| hs132671653 | AATACATCATTTATTCCACTAGG | 8082 |
| hs132671499 | GTAGAAGTAGAAGAATCCACGGG | 8083 |
| hs132670505 | ATCCTGTTGGCTGAAAGCAGTGG | 8084 |
| hs132671129 | TGTATTATCTTACTACAACTAGG | 8085 |
| hs132671081 | ATGTTGGATATTCAAAGAGGAGG | 8086 |
| hs132670755 | GCACATTGTATGTTATACACAGG | 8087 |
| hs132670775 | TATACTTGTGTGCTGTGAGAGGG | 8088 |
| hs132671911 | TAATGGTTATAAAAAACATGAGG | 8089 |
| hs132671650 | CTAAATGCAGACACACCTAGTGG | 8090 |
| hs132670146 | TTCGAGATGACAAGGCATAGTGG | 8091 |
| hs132671537 | TAGTAGATTTGAGACCCACATGG | 8092 |
| hs132670691 | GCATTAAGCAACACCAACAAGGG | 8093 |
| hs132670736 | ATGATAAAATAAGTATCAGGCGG | 8094 |
| hs132671812 | ATAAGAGGAGAGAGCCATGTGGG | 8095 |
| hs132670863 | AGGTTCTTTATGCACTAGAGAGG | 8096 |
| hs132671471 | TCAGTGCTATCTTTACAGCATGG | 8097 |
| hs132670031 | AGCTCTTCTAGATTACTGGAAGG | 8098 |
| hs132670439 | AATTTAGTGATATATGTGAAAGG | 8099 |
| hs132671206 | CTAACATTACTAATTACTGAAGG | 8100 |
| hs132671414 | TACAATACAATCGCAAACTGGGG | 8101 |
| hs132670072 | AGAGGCTGGAGCGCTCTGCGTGG | 8102 |
| hs132671354 | TATATTTGAGACGGGAGTGGGGG | 8103 |
| hs132671212 | TTACGGACAATGATTAACACTGG | 8104 |
| hs132670623 | AGATTGATGATAATCTTGAGTGG | 8105 |
| hs132671540 | TACATGTGTTAAATCCATGTGGG | 8106 |
| hs132670106 | GCTCAAGAGGGACTTTGCTGAGG | 8107 |
| hs132671028 | GGTTTAAAGAGGCCAGTAGGTGG | 8108 |
| hs132671749 | TACCAGATATGCTATGCTAGAGG | 8109 |
| hs132670923 | GGAAAATGAGTAATTAGCAGAGG | 8110 |
| hs132671773 | CATCACTCGTTCTCCCACACAGG | 8111 |
| hs132671893 | GCCTTATAAATGTTACAGCGTGG | 8112 |
| hs132671110 | TGAGTTCGAAAAGTTATGGAGGG | 8113 |
| hs132671175 | AATCTACCAGATTTTCAACATGG | 8114 |
| hs132671536 | TTACATTGACATGCTTAAGGGGG | 8115 |
| hs132670944 | AGTATGTAACTAACTCAAGTGGG | 8116 |
| hs132671660 | GTTATAGTCCAAAAACCTAGAGG | 8117 |
| hs132671242 | AAGCAGATGATGATGCCCTATGG | 8118 |
| hs132670028 | TGAAAATTGATGTATGCATGAGG | 8119 |
| hs132670909 | AGAACATTATATAAGTACCTAGG | 8120 |
| hs132670804 | GTGATAGAATCGCATTGCAGGGG | 8121 |
| hs132670470 | TGAGAGGTGATGTAGCATCTCGG | 8122 |
| hs132670022 | AAAATGCTAGGACTGTCCACTGG | 8123 |
| hs132670990 | CTTAACATGTTCCAACCAGAAGG | 8124 |
| hs132670297 | CCCGCCTTCCTACAATGCAAGGG | 8125 |
| hs132671871 | AGAGTCGATGGAGAGTCAAGAGG | 8126 |
| hs132670534 | CTTTTTTGTAATAACTCAAGGGG | 8127 |
| hs132671902 | GAAAAAGTCACACTGAAACCAGG | 8128 |
| hs132670716 | CATATGAGTGTATACACTGAGGG | 8129 |
| hs132670258 | GAATACCAGAAAGACAGCAATGG | 8130 |
| hs132670374 | ATGGACTACGGTCATTCTAGAGG | 8131 |
| hs132671456 | ATATTGCCTCAATATTTCAAGGG | 8132 |
| hs132671476 | ACTTGAATAGTGATCACCATAGG | 8133 |
| hs132670791 | ATCTGTAGGGAACTAGAGGTGGG | 8134 |
| hs132670413 | ATTGTTATATACAGCAATGGAGG | 8135 |
| hs132670628 | GCTGATGGCATCGAATGCATTGG | 8136 |
| hs132671218 | TATATATGTACTTAGAACAAAGG | 8137 |
| hs132670332 | GTAAGAACAAAGAAATCACTAGG | 8138 |
| hs132671299 | CGAAAGTTCTTAAAGTCTAGGGG | 8139 |
| hs132671566 | GCACATAAGTGTCACAGAGTAGG | 8140 |
| hs132671086 | ACAATGCTTTCCAAATCACCAGG | 8141 |
| hs132670729 | TGAATAATGCAGAGATGCGAAGG | 8142 |
| hs132670785 | ACAGTGCTGCAAATGAATTGAGG | 8143 |
| hs132671386 | GCAGTTTATGCATCCTACAATGG | 8144 |
| hs132670676 | AGACAAAGCAAGGTTTTGTGAGG | 8145 |
| hs132670808 | ATACAGTTAGCTTATTCTGGAGG | 8146 |
| hs132670095 | TAAACTACTAAGTTTGCAGGAGG | 8147 |
| hs132671524 | ATGCAGATGATCTAGAAATGAGG | 8148 |
| hs132671690 | ACAATATGTGGACAGTCTGAGGG | 8149 |
| hs132671243 | TGTTAGCAAGAAACACCATAGGG | 8150 |
| hs132670397 | CCAATGAGAATCAATTGGAGGGG | 8151 |
| hs132670504 | GACTTTTATTACTTTCCTTGAGG | 8152 |
| hs132670474 | TTCCTAAGAGAATTAGACCAAGG | 8153 |
| hs132671355 | ATATAAGGGGCGTAGCCTGAGGG | 8154 |
| hs132671076 | AGTCTTTATGATCCATCCAGTGG | 8155 |
| hs132671157 | ATTATCTAAGATCAACACTCAGG | 8156 |
| hs132671256 | CTCTGACTGTGAGAGAATGAGGG | 8157 |
| hs132670545 | AATATGCAGCAAATATTACTGGG | 8158 |
| hs132670335 | TCTTACAAACACCCTAAAAGGGG | 8159 |
| hs132670988 | TTAACACAGTATATTAACTGTGG | 8160 |
| hs132671686 | GTAATTGGCAAACAGAGGATGGG | 8161 |
| hs132671049 | GCTGCTTCTTCATGATAGGAGGG | 8162 |
| hs132670321 | CCTTTCTCATAAAATCAAGAAGG | 8163 |
| hs132670074 | CTGAAGCCAAGTAATAGAGACGG | 8164 |
| hs132670236 | AATTAAGCCTCTGAAGTCTGTGG | 8165 |
| hs132671588 | TACTGCATCTAGCCTACATGTGG | 8166 |
| hs132671022 | AAAAACAGTTGATTAAACAATGG | 8167 |
| hs132671663 | CTAACTCAGAGCTATTAGGAGGG | 8168 |
| hs132670401 | GCTTGGACATGCAATAGAGTGGG | 8169 |
| hs132671103 | TTACATTTAGCTGTAAACAAGGG | 8170 |
| hs132671866 | AGTCTTGGTGATTTCAACGGAGG | 8171 |
| hs132670950 | TTTATCATATAAAGACCTTGAGG | 8172 |
| hs132671377 | AGAATGAAAATACTTTAGGTGGG | 8173 |
| hs132671666 | TTACTATTTTAAATACATCAGGG | 8174 |
| hs132670627 | CATTCGATGCCATCAGCACAGGG | 8175 |
| hs132671797 | TGAGAAAAATGTTTCATCAGTGG | 8176 |
| hs132670523 | AACGCTAATAAATAAGAGAGAGG | 8177 |
| hs132670434 | GCAACTGGTGTATGTTAAGGAGG | 8178 |
| hs132670854 | TTGGCTTAGCAGGTAGCAGAAGG | 8179 |
| hs132671089 | GGTTTTTGTGCAAGCCAAGTGGG | 8180 |
| hs132670240 | GCGATGTCTTCAAGGAACATAGG | 8181 |
| hs132671756 | GTTAAAAACGTATGGCATGAGGG | 8182 |
| hs132671550 | CAGGGATTAAAATTAGGCATGGG | 8183 |
| hs132671886 | GCCAATTCGAAACGTGCTAGAGG | 8184 |
| hs132670178 | AACACTTCTTATATATGCAGAGG | 8185 |
| hs132671472 | GTAAAGATAGCACTGATACATGG | 8186 |
| hs132671061 | TCTGAAGTTGACATATTTTGGGG | 8187 |
| hs132670557 | ATGGTAGCTGATTCCACTAGAGG | 8188 |
| hs132670889 | CATATAAAGTACATTCCCCAGGG | 8189 |
| hs132670375 | ATTACAAACTCTATGGACTACGG | 8190 |
| hs132670155 | CGAACTTCATCATATCAAAGAGG | 8191 |
| hs132670725 | GAGAAATCATGTTTTTGACAGGG | 8192 |
| hs132670622 | ACTGAAAACCAAATTTGCAAAGG | 8193 |
| hs132671873 | CTTTGCAAGTAAACTAGCCAAGG | 8194 |
| hs132671859 | TACACCAAGCAAAGATATAGGGG | 8195 |
| hs132671075 | CTTAGTCATAGTCCACTGGATGG | 8196 |
| hs132670822 | ATTCAGCTTCATAAGTCCCAGGG | 8197 |
| hs132670500 | ACTTTCCTTGAGGCAGAGGGTGG | 8198 |
| hs132670530 | TCACTATACTTCAGTTCTGGTGG | 8199 |
| hs132671776 | TTAATTTTGTCCATATAACAAGG | 8200 |
| hs132670169 | AGGGGTTAGAACAACTTCCATGG | 8201 |
| hs132670668 | AAACAGAAGTAGGGAAAGAGGGG | 8202 |
| hs132670166 | GCAATTTCTGAAGGTCTTAGGGG | 8203 |
| hs132670104 | TCCTGAGAACATGCTCAAGAGGG | 8204 |
| hs132670867 | CATAATAGTGTCATATGTGAAGG | 8205 |
| hs132671799 | TTCTCAGCCTCTACACTCAGCGG | 8206 |
| hs132670293 | ACCCTTGCATTGTAGGAAGGCGG | 8207 |
| hs132670794 | GATCGATCTATCTATCTGTAGGG | 8208 |
| hs132671729 | CTGAATAGTTGATGGCCACAGGG | 8209 |
| hs132670675 | CAGCAAGCAAAGACAAAGCAAGG | 8210 |
| hs132671158 | TCTAAGATCAACACTCAGGAAGG | 8211 |
| hs132670877 | TTAAAATTCCAAATAGAACAAGG | 8212 |
| hs132670174 | CTATCAAAGTCAGCATTAAGGGG | 8213 |
| hs132671819 | GTAGAGCAGGTACAGCCTGTAGG | 8214 |
| hs132671104 | AGAGTTTCCAAGATCTGCTGAGG | 8215 |
| hs132670402 | AGCTTGGACATGCAATAGAGTGG | 8216 |
| hs132670357 | TCATGAATCTCTGTCAGCCAAGG | 8217 |
| hs132671270 | TTATTGCCAAAGTTGTAAGGAGG | 8218 |
| hs132670533 | ACTTTTTTGTAATAACTCAAGGG | 8219 |
| hs132671788 | ATTGAATACAGATTGAAGCCAGG | 8220 |
| hs132670070 | GAGAAAGGCTTCCTCTGGAGAGG | 8221 |
| hs132670759 | TTGATGATACACTCTGTGGTAGG | 8222 |
| hs132670812 | TTGACACTTTCAACTCAGCATGG | 8223 |
| hs132670538 | TTGGTCACAGAAATTTCTAAGGG | 8224 |
| hs132670273 | CTTCTTAACTGGAGCATCGGAGG | 8225 |
| hs132671725 | ACATGATTAGTTATCAGGATGGG | 8226 |
| hs132671422 | AGAGACAGTGAACCAAGCATGGG | 8227 |
| hs132671820 | ACTTCAAAGGAACTCAAGACAGG | 8228 |
| hs132671629 | CTATCACATAGAGTGTTAGAGGG | 8229 |
| hs132670665 | ACTTCAACAAAACAGAAGTAGGG | 8230 |
| hs132670326 | AATTCTCCTAAATCAATGGAAGG | 8231 |
| hs132670396 | CAATGAGAATCAATTGGAGGGGG | 8232 |
| hs132670931 | TTTGTAAAGGACAAGAATAGGGG | 8233 |
| hs132670956 | AGATGACTTTGATTGATAGAGGG | 8234 |
| hs132670501 | ATAAAAGTCCTCTATCCTGTTGG | 8235 |
| hs132671036 | TTATAAGCCACAGGCAGAGAGGG | 8236 |
| hs132670059 | ATTTAGCCTTTATTTCCAGAAGG | 8237 |
| hs132671522 | GGATTTGCTACACATAAAAGAGG | 8238 |
| hs132671874 | GCAAGTAAACTAGCCAAGGATGG | 8239 |
| hs132670027 | ATACATCAATTTTCAAATAGCGG | 8240 |
| hs132670897 | ATATAGATGACAGTTTATGTTGG | 8241 |
| hs132670120 | ACAAAACCCTGTTTGTTAGGGGG | 8242 |
| hs132670742 | AGTTTTATCAGAGAGCAAGATGG | 8243 |
| hs132671867 | GTCTTGGTGATTTCAACGGAGGG | 8244 |
| hs132671035 | TATAACGTGAACGCCTTGAGAGG | 8245 |
| hs132670602 | CAACAAGAAAGTTAAGGCAAAGG | 8246 |
| hs132670292 | CTAACCCTTGCATTGTAGGAAGG | 8247 |
| hs132670234 | ACGTTATCCACAGACTTCAGAGG | 8248 |
| hs132671348 | GTTTTGAACAGAAAACCCTCAGG | 8249 |
| hs132670765 | GTTCAGTGATGAAAGTAAGGAGG | 8250 |
| hs132671458 | TATTTGTTTAAAAATTAAGACGG | 8251 |
| hs132670805 | AGTGATAGAATCGCATTGCAGGG | 8252 |
| hs132671072 | TGCTAAGTAAAAAGTTAGAAGGG | 8253 |
| hs132671705 | TCCAGCAATCCTGTGTTGGGAGG | 8254 |
| hs132670879 | AATTACATCTTCTCAACCAGTGG | 8255 |
| hs132671265 | GTCAAATTTTCTCTTCACAAAGG | 8256 |
| hs132670829 | TTATTCAGTAGGCAAGAGAAGGG | 8257 |
| hs132670404 | GGGCAGTGAGATTTCAGAGATGG | 8258 |
| hs132671166 | TTATGCTCTTATGTATAAGAGGG | 8259 |
| hs132670746 | GGAGGAAAATACAGAGACTACGG | 8260 |
| hs132671029 | CTTGGTTTAAAGAGGCCAGTAGG | 8261 |
| hs132671716 | TTTCCTTAGAATCTTTTACTCGG | 8262 |
| hs132671740 | TTTAATAAGAACAATTTCAGTGG | 8263 |
| hs132670446 | ATAAGGGAGAGAAATCCCTATGG | 8264 |
| hs132671149 | CAGGCAACCAGAAAATAAGAAGG | 8265 |
| hs132671889 | GCGTGGGAATGAAATGTGCTAGG | 8266 |
| hs132671189 | AGAATTTCATTGCCATTTTGGGG | 8267 |
| hs132671039 | GCGTTCACGTTATAAGCCACAGG | 8268 |
| hs132671594 | GCCCTGACCTGCTTAAACACCGG | 8269 |
| hs132671374 | ATAACCCTATGCTTAAGAGATGG | 8270 |
| hs132671879 | GTACACATTTTTTAGCCGATAGG | 8271 |
| hs132670239 | ACATCGCTCATTAAAAAAGGTGG | 8272 |
| hs132670958 | ATCAAAGTCATCTTTAGCATAGG | 8273 |
| hs132671892 | CCTTATAAATGTTACAGCGTGGG | 8274 |
| hs132671861 | TGCTCCTTAATCTTAGGAGGTGG | 8275 |
| hs132671464 | TAGTTATGAGGATGAGACTAGGG | 8276 |
| hs132670756 | AATGTGCTATATAAAATATGTGG | 8277 |
| hs132671340 | GTGGAAGGAGAGTTGATGGGGGG | 8278 |
| hs132670295 | CCTTGCATTGTAGGAAGGCGGGG | 8279 |
| hs132671147 | TAAGAAGGTAAAATACAGGCAGG | 8280 |
| hs132671679 | GATACTTTTAATCTAAGGAGTGG | 8281 |
| hs132670719 | CCACAAAGTTGATAGGCATAGGG | 8282 |
| hs132671498 | AGTAGAAGTAGAAGAATCCACGG | 8283 |
| hs132670747 | GGCATTGAAGAGAATTAAGTAGG | 8284 |
| hs132670030 | AATACAATATTAATTTGGTGTGG | 8285 |
| hs132670696 | CCATTCTTCTAGTTTTATGGAGG | 8286 |
| hs132671845 | CCTTCATTAAGGCATCGCTCAGG | 8287 |
| hs132670618 | GCAGGTGATATCGCTAAAGATGG | 8288 |
| hs132671842 | CCTGAGCGATGCCTTAATGAAGG | 8289 |
| hs132670778 | GGAGGATGCAGGTAGGGGAAGGG | 8290 |
| hs132670678 | GAGCTCATTGATGTCATCCAAGG | 8291 |
| hs132670708 | TGGTGAGAACTTTTAAGCGAAGG | 8292 |
| hs132670355 | CTCTGTCAGCCAAGGAATGTCGG | 8293 |
| hs132670651 | ACCAGTATCCTGATATATGTTGG | 8294 |
| hs132670409 | ACAGCAATGGAGGTAGGGCAGGG | 8295 |
| hs132671511 | CTTCATTATAACATGTCCCAAGG | 8296 |
| hs132670039 | TTCCTTTAATGCCATTGCAGAGG | 8297 |
| hs132670908 | CCAAATTTCTGAAAGATCCAAGG | 8298 |
| hs132670981 | AGCAATCAGGACTTATGCATGGG | 8299 |
| hs132670948 | TATCATATAAAGACCTTGAGGGG | 8300 |
| hs132670797 | AAGTACAATCAAATTTGAAGAGG | 8301 |
| hs132671248 | TTAAAATATACTAAGCATGTAGG | 8302 |
| hs132670077 | CTATTACTTGGCTTCAGATGGGG | 8303 |
| hs132670792 | TATCTGTAGGGAACTAGAGGTGG | 8304 |
| hs132670619 | GTAATGCATTACTCAATGGCAGG | 8305 |
| hs132671269 | TATTGCCAAAGTTGTAAGGAGGG | 8306 |
| hs132671137 | ATTACCATCTCTTTCAGGAGTGG | 8307 |
| hs132670036 | ATATTTACATACCTCTGCAATGG | 8308 |
| hs132670050 | GTAAGAAAACAAGGAGGTAGGGG | 8309 |
| hs132670177 | GCAGCCTGAGAGATGTGCGCAGG | 8310 |
| hs132671589 | CAGTATGCCTTCTTTAGGAAGGG | 8311 |
| hs132671349 | TACGCCCCTTATATTTGAGACGG | 8312 |
| hs132671273 | TAGTGTGTTAGGTTTATCAGTGG | 8313 |
| hs132670158 | AAGAGGGTAAGTGCACTGAAAGG | 8314 |
| hs132670447 | TAAGGGAGAGAAATCCCTATGGG | 8315 |
| hs132671750 | ATATCTGGTAGCAGAATTGGAGG | 8316 |
| hs132670265 | CAGAAGGCGCAGAGTTCGAATGG | 8317 |
| hs132671450 | TTACCATGATAACCCAATTGTGG | 8318 |
| hs132671205 | CATTACTAATTACTGAAGGATGG | 8319 |
| hs132671058 | CTGAGAAAATTTGCAGCACAGGG | 8320 |
| hs132671282 | TATAACACTGGACTAAGCATTGG | 8321 |
| hs132670398 | CCCAATGAGAATCAATTGGAGGG | 8322 |
| hs132671811 | ATGTGGGTGACTGTCCCCTATGG | 8323 |
| hs132671870 | AATTGAGTCTAGAGAGTCGATGG | 8324 |
| hs132671882 | AATGATAGACCTGATCCTATCGG | 8325 |
| hs132671115 | AGAGTTCAAGGTTTGCTCAAGGG | 8326 |
| hs132671350 | ACGCCCCTTATATTTGAGACGGG | 8327 |
| hs132670677 | AAGCAAGGTTTTGTGAGGCAAGG | 8328 |
| hs132671910 | TATGTAACTTCGAAAAGTGTAGG | 8329 |
| hs132670793 | ATCTATCTGTAGGGAACTAGAGG | 8330 |
| hs132671858 | GTATGCTCCTTAATCTTAGGAGG | 8331 |
| hs132671549 | GCAGGGATTAAAATTAGGCATGG | 8332 |
| hs132671848 | TGTGCTACCAGAATAGGCATTGG | 8333 |
| hs132671607 | GAGTCAATTTTTGCGAACCAAGG | 8334 |
| hs132670193 | TGATTTATTGATATTTACACAGG | 8335 |
| hs132671703 | CAGCAATCCTGTGTTGGGAGGGG | 8336 |
| hs132670767 | GGAAAGTTTAATCAATTCTGAGG | 8337 |
| hs132670274 | TGTCTTCTTAACTGGAGCATCGG | 8338 |
| hs132671112 | CTTTTCGAACTCATACAGACCGG | 8339 |
| hs132671692 | TCTGAGGGACAAGTTGTGCCAGG | 8340 |
| hs132671088 | CGGTTTTTGTGCAAGCCAAGTGG | 8341 |
| hs132670244 | GGAGAAAGGTAAAAAAATCAGGG | 8342 |
| hs132671457 | CAGTGGCCCTTGAAATATTGAGG | 8343 |
| hs132670455 | CTACCCATTAGTTCCCCCATAGG | 8344 |
| hs132670288 | TCAGTATATGAGATTGCTGTAGG | 8345 |
| hs132671387 | GATGAATGGGATCCAAGAATCGG | 8346 |
| hs132670443 | ATGTGGTATATCCTTCATAAGGG | 8347 |
| hs132671865 | TTAAGTCTTGGTGATTTCAACGG | 8348 |
| hs132671225 | TGAAATTAATGTGTGTTCAGTGG | 8349 |
| hs132671085 | GCCATCAGAGAGTAGAAGAAAGG | 8350 |
| hs132671171 | TCCCAGAACAGGTAGTGAAAGGG | 8351 |
| hs132670982 | AAGCAATCAGGACTTATGCATGG | 8352 |
| hs132671375 | AAATGGTATTACTAAAGCCATGG | 8353 |
| hs132671547 | GCACATATCCTTGCATATTGTGG | 8354 |
| hs132671582 | ATAACTGAGTCACACAACTAAGG | 8355 |
| hs132670873 | TTGTACACTTACAATATGGCAGG | 8356 |
| hs132670984 | TAAATAAATCCTTTTTGCCAGGG | 8357 |
| hs132670871 | GCATGTGGCAGTTACTTGAATGG | 8358 |
| hs132671905 | ATTTTTCTGGATCTACGTAAAGG | 8359 |
| hs132670584 | TTTTACAAATTTATTAACACGGG | 8360 |
| hs132671834 | CAGCACAAATCACAAGAGATGGG | 8361 |
| hs132670850 | AAGTGAAGTAATATTTCTATGGG | 8362 |
| hs132670646 | GTAACTTAAGTAAATGTAGGAGG | 8363 |
| hs132671428 | ATTCTAATCGATGGGTCTTGTGG | 8364 |
| hs132671096 | AAACTCTTAGATCATATGCCTGG | 8365 |
| hs132671728 | CTGTGGCCATCAACTATTCAGGG | 8366 |
| hs132671430 | AATCCATAATTCTAATCGATGGG | 8367 |
| hs132670641 | TCTTTGTCTAGCCTATCTACTGG | 8368 |
| hs132670892 | TCAAAACCTAAGCAAACCCTGGG | 8369 |
| hs132671798 | TCTCAGCCTCTACACTCAGCGGG | 8370 |
| hs132670394 | GAGGGGGAGAGATTGGAGAGAGG | 8371 |
| hs132671621 | TGAATGCCTGTTGTGTAAGAAGG | 8372 |
| hs132670229 | ATGAGAGGCATGACAGTGAATGG | 8373 |
| hs132670431 | AACTAGGTAAATTTTCTCCAAGG | 8374 |
| hs132670611 | ATATTGACTGAATTGACTGTAGG | 8375 |
| hs132671763 | ACAAAAGCACTCTGAGCTAAGGG | 8376 |
| hs132671586 | TAAGAGGCCCTTCCTAAAGAAGG | 8377 |
| hs132670301 | GTGTACTGTGCTGTTAGGCACGG | 8378 |
| hs132670511 | ATAGGAGTAATCATGCTTCAGGG | 8379 |
| hs132671739 | TGAAATTGTTCTTATTAAAGGGG | 8380 |
| hs132671823 | CTGTACCTGCTCTACTTCAAAGG | 8381 |
| hs132670282 | TGTTGTGTAGATGGGAGTGATGG | 8382 |
| hs132670502 | ATTACTTTCCTTGAGGCAGAGGG | 8383 |
| hs132670904 | TATATGTATAATTATCTTGGTGG | 8384 |
| hs132671431 | AAATCCATAATTCTAATCGATGG | 8385 |
| hs132671895 | GGTTCCATACAATATTGAAAGGG | 8386 |
| hs132671791 | CTTTAGCTTATGAAACTCATGGG | 8387 |
| hs132670788 | TATGTGATGGTACTTTCCTAAGG | 8388 |
| hs132670707 | TTGTCTATTTGACACTGGGTCGG | 8389 |
| hs132671714 | TTTTTGTTCTGAGGTTGCTGAGG | 8390 |
| hs132671445 | ACTAATGTATCACAATATGCAGG | 8391 |
| hs132670975 | ACAAGATTCCTTCATAAGGATGG | 8392 |
| hs132671488 | TCCTGGCTTCTAGGATCAAGTGG | 8393 |
| hs132671154 | TGAAGCTATCATTAGAGGAAAGG | 8394 |
| hs132671400 | TCTATTACGATGAGGTTGATGGG | 8395 |
| hs132670159 | AGAGGGTAAGTGCACTGAAAGGG | 8396 |
| hs132671662 | TCTAACTCAGAGCTATTAGGAGG | 8397 |
| hs132671517 | TGAGAGGTATGTATAACAATGGG | 8398 |
| hs132670453 | TACCCATTAGTTCCCCCATAGGG | 8399 |
| hs132670881 | TTGAAGTAGAAAATTCTGACAGG | 8400 |
| hs132670937 | ATTTACAGAAACAAACCATAGGG | 8401 |
| hs132670685 | ACTTCTGGTTATTACTGGCCCGG | 8402 |
| hs132670592 | GGGAGTTTATGGTTGTTGTAGGG | 8403 |
| hs132670372 | AGTAAACTGCTTTAGACAAGTGG | 8404 |
| hs132670828 | AGTAGGCAAGAGAAGGGCATTGG | 8405 |
| hs132671808 | GCATGCACGTGTTTTCCATAGGG | 8406 |
| hs132671787 | AACTCAAGTAAGATTGGAAGTGG | 8407 |
| hs132671019 | CCAAGTATCATTTTGAGTTGGGG | 8408 |
| hs132670898 | TAAACTGTCATCTATATTGGTGG | 8409 |
| hs132671044 | ATGTTTGTATGAACAGAGACAGG | 8410 |
| hs132671050 | AGCTGCTTCTTCATGATAGGAGG | 8411 |
| hs132670144 | TCAGAAGAGCACAAGTAAGTTGG | 8412 |
| hs132670694 | TAAGGTCCAATGAAATATGATGG | 8413 |
| hs132670655 | GTACCGAGAATTAAGAATATGGG | 8414 |
| hs132670478 | TCTGTCATGGAAAGATGCCTTGG | 8415 |
| hs132670634 | CCTTATTTCTCCTCAAGGCAAGG | 8416 |
| hs132671697 | GTTGTGCCAGGAGGGGGCAAAGG | 8417 |
| hs132670577 | CAGATAATAACATTGTGCCTAGG | 8418 |
| hs132670276 | GGTATCATACGTACACATATGGG | 8419 |
| hs132670359 | AATAACTCTGTACTGTTTGGTGG | 8420 |
| hs132671715 | GGATATCCTTTTTTGTTCTGAGG | 8421 |
| hs132670092 | AACCTAAAGGCATTTATCAAGGG | 8422 |
| hs132670552 | ATAAGTTGAAATGTACCAATGGG | 8423 |
| hs132671518 | ATGAGAGGTATGTATAACAATGG | 8424 |
| hs132671489 | GCCACTTGATCCTAGAAGCCAGG | 8425 |
| hs132671264 | TTGTGAAGAGAAAATTTGACTGG | 8426 |
| hs132670425 | GAGAACTAACAACAATAAAGAGG | 8427 |
| hs132670506 | GCTTTCAGCCAACAGGATAGAGG | 8428 |
| hs132671236 | TAGTAACTTTGTGTAAAGGTGGG | 8429 |
| hs132670795 | TGATCGATCTATCTATCTGTAGG | 8430 |
| hs132671285 | TATAACTGTAGAAATACAAAAGG | 8431 |
| hs132670296 | AGGGTTAGTGTAATATCTAAAGG | 8432 |
| hs132670740 | TCAGAGAGCAAGATGGCATAGGG | 8433 |
| hs132671202 | ACCATTTTATTTATCTGCACCGG | 8434 |
| hs132670526 | TTAATAGGATGCATAATGTCAGG | 8435 |
| hs132670700 | CTGTTACTGAAAGCATAAGATGG | 8436 |
| hs132671601 | AATTTGAATGAATTATTGGATGG | 8437 |
| hs132670939 | ATTTTCTTCTCACAGATGACTGG | 8438 |
| hs132671642 | AAAAAAGCTTTGAATAGTGTGGG | 8439 |
| hs132670563 | CATATTTTAATTTATGGACGTGG | 8440 |
| hs132670780 | ATTGAGGAGGATGCAGGTAGGGG | 8441 |
| hs132670820 | CATTCAGCTTCATAAGTCCCAGG | 8442 |
| hs132671283 | AAAAGGCTCAACTATAACACTGG | 8443 |
| hs132671130 | ACTACAACTAGGATGCCAAATGG | 8444 |
| hs132671868 | GGTGATTTCAACGGAGGGAATGG | 8445 |
| hs132671384 | TGGTCCATCGACTCGTACTCAGG | 8446 |
| hs132670287 | TGAGATTGCTGTAGGTTTCGTGG | 8447 |
| hs132671916 | ATGAAAGTAGAAACCATTACGGG | 8448 |
| hs132670816 | TTTTTGGCAATCCTTCCTAAAGG | 8449 |
| hs132671801 | TTCTTAATCACAGAGACAAATGG | 8450 |
| hs132670699 | CCTCCATAAAACTAGAAGAATGG | 8451 |
| hs132670259 | AATACCAGAAAGACAGCAATGGG | 8452 |
| hs132670650 | GTATCCTGATATATGTTGGTTGG | 8453 |
| hs132671293 | ACAAAAAACCAGAAAGAGTTGGG | 8454 |
| hs132671734 | GAGGTGTTGCTGATTAGAGTAGG | 8455 |
| hs132671196 | TTTGTGTACACATAGTGTAAAGG | 8456 |
| hs132670204 | AGGCAAATTTCTTTTTTCGTCGG | 8457 |
| hs132671410 | GAGTGAACAGCAATACTTAAGGG | 8458 |
| hs132671164 | ATAATACAAAGCACGTAAAAGGG | 8459 |
| hs132671894 | GGGTTCCATACAATATTGAAAGG | 8460 |
| hs132671592 | TTGTTTGGATCTCCACATGTAGG | 8461 |
| hs132670674 | AGTTGTTGAGAATGATTCCTAGG | 8462 |
| hs132671649 | ATAAATGTAAATTACATGCTAGG | 8463 |
| hs132670151 | TTTTCCAGTTTCTATAAAAGTGG | 8464 |
| hs132671720 | AGGCTCTTAAAAGTAGATGTAGG | 8465 |
| hs132671152 | CTATCATTAGAGGAAAGGTTGGG | 8466 |
| hs132670131 | CCAAAGGTTGAATTTTCTCTGGG | 8467 |
| hs132671074 | TTCACTTAGTCATAGTCCACTGG | 8468 |
| hs132671680 | AGTATCACTAATTTGCTTCGAGG | 8469 |
| hs132671760 | CCTAGAAATACAAATTAAGTTGG | 8470 |
| hs132671370 | TTCGTCCATCTCTTAAGCATAGG | 8471 |
| hs132671006 | ATATAAACTAGAATGATGTTTGG | 8472 |
| hs132671132 | TTAATGCACCATTTTTTCACAGG | 8473 |
| hs132671221 | TTTATATCTTAACTTTGTAGTGG | 8474 |
| hs132670837 | GGAGGAGTAGGAGAGGCGGCTGG | 8475 |
| hs132671051 | AGAAGCTGCTTCTTCATGATAGG | 8476 |
| hs132671743 | GTAACTTTATCGGTCAAAATGGG | 8477 |
| hs132671083 | TCTCTGATGGCACAGTAGCCTGG | 8478 |
| hs132670786 | TTTAAATATCTGTTATGTGATGG | 8479 |
| hs132670670 | TATATGATCTTAGAGTGTATTGG | 8480 |
| hs132671914 | TCTAAGGTTCTCTTTGACAAAGG | 8481 |
| hs132670800 | CTGCAATGCGATTCTATCACTGG | 8482 |
| hs132671239 | TATTTTTTAATCACACATGAAGG | 8483 |
| hs132670475 | GCATCTTTCCATGACAGAGCAGG | 8484 |
| hs132670438 | GTGATATATGTGAAAGGTAACGG | 8485 |
| hs132670436 | AACGGGATAAACCAAGCAACTGG | 8486 |
| hs132670208 | TTAAAATGTCTTTTATTCCAAGG | 8487 |
| hs132670078 | TCTATTACTTGGCTTCAGATGGG | 8488 |
| hs132671222 | TATAAAAGAGTTTAATTGCATGG | 8489 |
| hs132670422 | TTATAAAAGTTGAATGGCAAAGG | 8490 |
| hs132670763 | GATGAAAGTAAGGAGGAGATGGG | 8491 |
| hs132670352 | GTAAACAAACCGACATTCCTTGG | 8492 |
| hs132670349 | TGAGGTGTGGGAGGAAAAATGGG | 8493 |
| hs132670660 | TATTACATACTGTCATTCACTGG | 8494 |
| hs132670433 | CTTAACATACACCAGTTGCTTGG | 8495 |
| hs132670452 | GGGATTTCTCTCCCTTATGAAGG | 8496 |
| hs132671569 | GTACAGATCTTCAAATATCCAGG | 8497 |
| hs132671302 | ACAGAAGGAATCTTAATGTCAGG | 8498 |
| hs132671383 | ACGAGTCGATGGACCATTGTAGG | 8499 |
| hs132671389 | CTTATTACTAGCGTGATGAATGG | 8500 |
| hs132671477 | TTAAAACAGGTTTTCAAAGAGGG | 8501 |
| hs132670219 | AAGATGCCAGTATCATCAACTGG | 8502 |
| hs132671675 | GTAATTTGTTCAGTCACATCAGG | 8503 |
| hs132670581 | ATGCATGTACTTTCAGGCCTAGG | 8504 |
| hs132670600 | GTACCTCAACAAGAAAGTTAAGG | 8505 |
| hs132671131 | CTACAACTAGGATGCCAAATGGG | 8506 |
| hs132671201 | GCACATTTAACAAACTCTTAGGG | 8507 |
| hs132670848 | TGACTGTTCGTTTCGTGTGTAGG | 8508 |
| hs132670421 | TATAAAAGTTGAATGGCAAAGGG | 8509 |
| hs132671173 | AGTTGAGCCATTCCCAGAACAGG | 8510 |
| hs132670300 | TGTACTGTGCTGTTAGGCACGGG | 8511 |
| hs132671371 | TCGTCCATCTCTTAAGCATAGGG | 8512 |
| hs132670865 | TCTAATTTGTGTTAATTACTGGG | 8513 |
| hs132670940 | GGATTGTTATTTAAATTTGGTGG | 8514 |
| hs132670890 | ACATTCCCCAGGGTTTGCTTAGG | 8515 |
| hs132671677 | AGTCACATCAGGATGTATAAAGG | 8516 |
| hs132671754 | TTAAATGAGTTAAAAACGTATGG | 8517 |
| hs132671099 | GGTCTGAGTTTCTCTCTGCTTGG | 8518 |
| hs132671512 | TTAGGTGTCTCTGGGAACTCTGG | 8519 |
| hs132670661 | GAGTTCTTATGGCAGCAGTCAGG | 8520 |
| hs132671052 | TCAAAGATATACTCAAAGATTGG | 8521 |
| hs132671318 | GTCTCAGTATACTGTGAAAAGGG | 8522 |
| hs132671238 | TTTATAGTAACTTTGTGTAAAGG | 8523 |
| hs132670067 | GGAGGTCGATTAGAAAAATCTGG | 8524 |
| hs132670253 | TCAATGGTTTGGAAGCTACTAGG | 8525 |
| hs132671696 | GGACAAGTTGTGCCAGGAGGGGG | 8526 |
| hs132670105 | TTCTCAGGATTTTTGAAGCCCGG | 8527 |
| hs132670591 | TTATGGTTGTTGTAGGGCAGTGG | 8528 |
| hs132670403 | GATTTCAGAGATGGCTAGCTTGG | 8529 |
| hs132671641 | TGATAATTCTAAATAAGAATAGG | 8530 |
| hs132670248 | GTATGATACGACTGTTAACCTGG | 8531 |
| hs132671795 | ATTCTGTGTCTTTCATTACCTGG | 8532 |
| hs132670141 | GTTGGTGCTGGCAGCTTAGTGGG | 8533 |
| hs132670947 | GAGAAACAATAAACCAATGATGG | 8534 |
| hs132671435 | GTTAACTTGCTAAAATTCATGGG | 8535 |
| hs132670959 | TCAGTTGGATTTCTTTCAAAGGG | 8536 |
| hs132671240 | ATTTTTAGAATAATGATATGAGG | 8537 |
| hs132670993 | TTCTCAGTCAAGCAGAACTCTGG | 8538 |
| hs132670451 | ATCCCTATGGGGGAACTAATGGG | 8539 |
| hs132671637 | AATAATTCAGAGGACAAAACAGG | 8540 |
| hs132670632 | CTTGCCTTGAGGAGAAATAAGGG | 8541 |
| hs132670721 | TCTCAGTCCACAAAGTTGATAGG | 8542 |
| hs132671466 | CTATTCGAAGTTATACATATGGG | 8543 |
| hs132670687 | TCAACAATTTATTCATAAAGTGG | 8544 |
| hs132671427 | CGATGGGTCTTGTGGAATAGTGG | 8545 |
| hs132670639 | GTAAGATATCCATAATCAATTGG | 8546 |
| hs132670081 | ACTACCCCGTCTCTATTACTTGG | 8547 |
| hs132670861 | CTTTAAGACACAGTAGAGATAGG | 8548 |
| hs132671167 | GTTATGCTCTTATGTATAAGAGG | 8549 |
| hs132671440 | TATGTTGTCAGAAACATCTAAGG | 8550 |
| hs132671013 | CCCCAACTCAAAATGATACTTGG | 8551 |
| hs132670496 | ATACCATTCTTTGAAATGGCAGG | 8552 |
| hs132670026 | AACAGCAGATACAGACAATAGGG | 8553 |
| hs132671442 | TCTAGAATGACTGGTTTAGATGG | 8554 |
| hs132670101 | TGTACTCCTTGCAGGTCGCCGGG | 8555 |
| hs132671667 | TTTTAAATACATCAGGGCTTAGG | 8556 |
| hs132670749 | AATAATCACTTACTAAAAATGGG | 8557 |
| hs132671612 | TGTCTCTTGATACCAGAGATAGG | 8558 |
| hs132671824 | TGAGCTTTCACTGCCCCTACAGG | 8559 |
| hs132670400 | GTGACCCAATGAGAATCAATTGG | 8560 |
| hs132670272 | CCAGTTAAGAAGACAAAAATGGG | 8561 |
| hs132670210 | GGAAATAAAGATATAAAAAGTGG | 8562 |
| hs132670205 | TATATTTTCCATAGAGACCTTGG | 8563 |
| hs132670945 | CAAGTGGGCTCATCCATCATTGG | 8564 |
| hs132670683 | ATAAACTGAAAGTCAAATGTAGG | 8565 |
| hs132670733 | GCAGGTTATCATATGAATAGTGG | 8566 |
| hs132671271 | GTTTTATTGCCAAAGTTGTAAGG | 8567 |
| hs132671900 | TGTTTAGTACTTTCTATATGAGG | 8568 |
| hs132671214 | TAATAGAGAAAACTGAAGATAGG | 8569 |
| hs132671509 | TTTCAGCCAAAAATTTCCTTGGG | 8570 |
| hs132671470 | ATAATACTAAACACTTACATAGG | 8571 |
| hs132671027 | ACAAAAATGTTGCCACCTACTGG | 8572 |
| hs132670864 | GTGTTACTTGACTTGTCCTCAGG | 8573 |
| hs132670644 | AGAAGAGCTTGAAAATCATATGG | 8574 |
| hs132671918 | ATAAATATGAATTCCCGTAATGG | 8575 |
| hs132671291 | AGTAAAGAACATTTACTGAATGG | 8576 |
| hs132671478 | GTTAAAACAGGTTTTCAAAGAGG | 8577 |
| hs132670773 | AGAAATAATACATAGAATTACGG | 8578 |
| hs132670388 | GGAGTCTTGGATCAAATAACAGG | 8579 |
| hs132671516 | TTATACATACCTCTCATCATTGG | 8580 |
| hs132670762 | ATGATGTTAATATTTCAGATTGG | 8581 |
| hs132670935 | ATTCAGCTTATTAAACCCTATGG | 8582 |
| hs132670042 | TGGAAATATTTCATTACCTAGGG | 8583 |
| hs132670471 | TTTTACCTTATACTGATATGAGG | 8584 |
| hs132670616 | GCTAAAAACAAAGGACTTTGAGG | 8585 |
| hs132671268 | TGACTCCCTCCTTACAACTTTGG | 8586 |
| hs132670571 | GAAACTGTAAATCTGGAATAGGG | 8587 |
| hs132670279 | TCTATAGCCTATTAAACAAAAGG | 8588 |
| hs132670325 | GGCAAATTCTCCTAAATCAATGG | 8589 |
| hs132670423 | GTGATTTTATAAAAGTTGAATGG | 8590 |
| hs132671324 | AATAAGACTGTCTTCACAACTGG | 8591 |
| hs132670809 | CTAACTGTATTTGGAAATCAGGG | 8592 |
| hs132671475 | CCATAGGATTAATAAAACTTAGG | 8593 |
| hs132671495 | TTTGGTACCTCAAATAGTTCAGG | 8594 |
| hs132670608 | TCACACAAAATAACTAAAATGGG | 8595 |
| hs132670706 | CATTTTGTCTATTTGACACTGGG | 8596 |
| hs132670713 | AAATGCTTCAAATTATACTTAGG | 8597 |
| hs132671913 | TCTTTGACAAAGGCTGCTAATGG | 8598 |
| hs132670705 | ACATTTTGTCTATTTGACACTGG | 8599 |
| hs132670724 | TGAGAAATCATGTTTTTGACAGG | 8600 |
| hs132670118 | GTGCTTGCTTGCAATATTTGTGG | 8601 |
| hs132670519 | CATGCTTCCATTTCCTCAGTTGG | 8602 |
| hs132670522 | TTTCTATGTTCACCTCACTTAGG | 8603 |
| hs132670915 | GGTCAATTTTGAAGATAAATGGG | 8604 |
| hs132670726 | ACAGGGCTTGTTTCTCAAGTTGG | 8605 |
| hs132671869 | GTTGAAATCACCAAGACTTAAGG | 8606 |
| hs132670750 | GTATGTTAGTTAAATACTAATGG | 8607 |
| hs132670771 | ATAGAATTACGGCTGATTATGGG | 8608 |
| hs132670507 | TTCCACTGCTTTCAGCCAACAGG | 8609 |
| hs132671493 | ACTTGTTCCTGAACTATTTGAGG | 8610 |
| hs132670122 | TTACAAAACCCTGTTTGTTAGGG | 8611 |
| hs132671814 | AAAATAACGTTCTCTATAAGAGG | 8612 |
| hs132671047 | TTTGTCACAAAAGTGCTTTAGGG | 8613 |
| hs132671432 | GCTCATCTTAGACAGCTATATGG | 8614 |
| hs132670251 | ATTTCCACAAATTCAATCAATGG | 8615 |
| hs132670751 | TATGTTAGTTAAATACTAATGGG | 8616 |
| hs132670657 | CAGCCCATATTCTTAATTCTCGG | 8617 |
| hs132670579 | TATTATCTGAAAAGCTTGATAGG | 8618 |
| hs132671741 | GAGAGAGCATGTAACTTTATCGG | 8619 |
| hs132671860 | ATACACCAAGCAAAGATATAGGG | 8620 |
| hs132671462 | GATTTAGAGTTCTAGTTATGAGG | 8621 |
| hs132670323 | CCTTCTTGATTTTATGAGAAAGG | 8622 |
| hs132670541 | ATATTATAAACATATAAAATTGG | 8623 |
| hs132670247 | AGAATTTCTCTGACTAGAAATGG | 8624 |
| hs132670917 | TTTAAAATAACATTTATATAGGG | 8625 |
| hs132671885 | TCCTCTAGCACGTTTCGAATTGG | 8626 |
| hs132670201 | GTATATGTATATATGTTCTAAGG | 8627 |
| hs132671827 | AGATGATGTTACATGTAGTTAGG | 8628 |
| hs132671482 | GCAATTCTTGCATCATGTATTGG | 8629 |
| hs132671771 | GGAGAACGAGTGATGTAATTTGG | 8630 |
| hs132671358 | CACTCCCGTCTCAAATATAAGGG | 8631 |
| hs132670932 | CTTTGTAAAGGACAAGAATAGGG | 8632 |
| hs132671718 | ATACCGAGTAAAAGATTCTAAGG | 8633 |
| hs132671023 | TTACGAGTACCAACACTATTAGG | 8634 |
| hs132670587 | AGCAATGTTGGCCAACTATACGG | 8635 |
| hs132670874 | TTCATTGTACACTTACAATATGG | 8636 |
| hs132671561 | AATGAAATTTCAAATCCATTTGG | 8637 |
| hs132670311 | TCCATTTTCAAGGTATTGATTGG | 8638 |
| hs132670710 | TTTCTACTCAAGTCAGATAATGG | 8639 |
| hs132670562 | GGCTTTATATTACACTAAAAAGG | 8640 |
| hs132670190 | CTTAAATACGAGCTAGGTTAAGG | 8641 |
| hs132671505 | GAAAGAGGACTACATATCTTAGG | 8642 |
| hs132671534 | CTTTACATTGACATGCTTAAGGG | 8643 |
| hs132670992 | GCAGAACTCTGGACACCTTCTGG | 8644 |
| hs132670485 | AGAATCTCTTTCCTTGAATAGGG | 8645 |
| hs132670477 | TGCCTTGGTCTAATTCTCTTAGG | 8646 |
| hs132670112 | TGAGCAGAACAAACAAATATTGG | 8647 |
| hs132670093 | TGCCCTTGATAAATGCCTTTAGG | 8648 |
| hs132671857 | GGTGTATGCTCCTTAATCTTAGG | 8649 |
| hs132670331 | TTTCTCAGAAATTTATTAGATGG | 8650 |
| hs132671134 | ATAGCAAGCCTGTGAAAAAATGG | 8651 |
| hs132670821 | TGGAGAGGCACTTTGCCTTTAGG | 8652 |
| hs132670758 | CAGAGTGTATCATCAAAATTAGG | 8653 |
| hs132671136 | AGGAGTGGAAGAGAGAGAATTGG | 8654 |
| hs132671644 | ATTTCCTAACCTATTTTGATAGG | 8655 |
| hs132670058 | ATGCTGTTAGAAATTTTAGATGG | 8656 |
| hs132671619 | TTTATAAATATAATGCAAAATGG | 8657 |
| hs132670238 | AAGACATCGCTCATTAAAAAAGG | 8658 |
| hs132671712 | CAGCAACCTCAGAACAAAAAAGG | 8659 |
| hs132670099 | GGGAGGAGTGTACTCCTTGCAGG | 8660 |
| hs132670986 | GTTCTATGTCCCTGGCAAAAAGG | 8661 |
| hs132671046 | GTTCATACAAACATTCGATTTGG | 8662 |
| hs132670636 | TTTTAGTATCTACTCATTAGAGG | 8663 |
| hs132670154 | TCTGCCACTTTTATAGAAACTGG | 8664 |
| hs132671678 | TTAGTGATACTTTTAATCTAAGG | 8665 |
| hs132670680 | TGACTTTCAGTTTATTTAACAGG | 8666 |
| hs132671043 | TTTGGAGTAAAAATACAAATTGG | 8667 |
| hs132671460 | TATGGTGCAATTTTTTTCATTGG | 8668 |
| hs132671448 | TATCATGGTAAAGAGCTTTATGG | 8669 |
| hs132671069 | ATATAATATCTGTTTCAATTTGG | 8670 |
| hs132670686 | AAGTGGCTGCAAATATAATTTGG | 8671 |
| hs132670029 | TTAAAGCTCTTCTAGATTACTGG | 8672 |
| hs132670207 | CTTTTATTCCAAGGTCTCTATGG | 8673 |
| hs132671425 | AGACCCATCGATTAGAATTATGG | 8674 |
| hs132671673 | TTTAGCTCAACTCTATAAATTGG | 8675 |
| hs132671738 | CTGAAATTGTTCTTATTAAAGGG | 8676 |
| hs132670559 | AACTCAGTACATATTCTATTTGG | 8677 |
| hs132670640 | ATAAGTTTACCAATTGATTATGG | 8678 |
| hs132670922 | GCAGAGGTGCAGATTATATTTGG | 8679 |
| hs132670308 | TTTTATATAAAACCTGAAATTGG | 8680 |
| hs132671784 | ACAAAGAGTTGAAAATTAATTGG | 8681 |
| hs132671295 | GTTAAGTGAATGAACAAAATTGG | 8682 |
| hs132670369 | TTAATCAGTCATTTATAAATAGG | 8683 |
| hs132671496 | TTAAAGTCATTTTAACTATTTGG | 8684 |
| hs132671617 | TTACATTTGGTAAAGATATTTGG | 8685 |
| hs132670429 | GTTTGGTTCAATTAGATTTTAGG | 8686 |
| hs132671286 | GCTTCATGATATGGTATAATTGG | 8687 |
| hs132670723 | TTTACTGATGTTTTTCTAAATGG | 8688 |
| hs132669975 | TCATGTACCCCTGACAAAGAAGG | 8689 |
| hs132669980 | GTTAACTTCCTTCTTTGTCAGGG | 8690 |
| hs132670000 | AGGATGTAAGAGAGTAATTGAGG | 8691 |
| hs132669977 | TCTTTGTCAGGGGTACATGATGG | 8692 |
| hs132669986 | CTGGGAATATAAATCTAAATGGG | 8693 |
| hs132669982 | AATTAGAACTCTAGGTAAATCGG | 8694 |
| hs132669985 | AGATTTATATTCCCAGTAAAAGG | 8695 |
| hs132669674 | CTACTGCTTAATCACCCATGGGG | 8696 |
| hs132669542 | AACATGAACCAGATGCACAGAGG | 8697 |
| hs132669647 | AATAACATAAAGAAGCTGCGTGG | 8698 |
| hs132669873 | TGGAAACCTAGAGTGCACAAAGG | 8699 |
| hs132669493 | ATAGACTTTATAAAACCTAGAGG | 8700 |
| hs132669226 | GGCCTAGGTTCACAGCCCAGCGG | 8701 |
| hs132669877 | CACAAAGGAGAAGACACTGGTGG | 8702 |
| hs132669704 | AGAGTCAAATAGACACTTGGGGG | 8703 |
| hs132669332 | TAATTCATAGTAATCTCCTGGGG | 8704 |
| hs132669518 | GCTCAAAAATTCTAGCAAGGTGG | 8705 |
| hs132669812 | AGGGTTTGGATAGATCCAGTCGG | 8706 |
| hs132669466 | AGATACGTTTTCATGTCCGGGGG | 8707 |
| hs132669451 | TGACTGGCAATAGAGAGCCGAGG | 8708 |
| hs132669209 | AAGCCCACTATCAGTCACCCCGG | 8709 |
| hs132669349 | GAAGAACCTAAGGATTGTGGAGG | 8710 |
| hs132669876 | GTGCACAAAGGAGAAGACACTGG | 8711 |
| hs132669902 | TCACTACCCCTAGATGTGAGAGG | 8712 |
| hs132669212 | TCTGAGAAATAATAGTTCCGGGG | 8713 |
| hs132669230 | TGGTTGTAGAGCTTACCGCTGGG | 8714 |
| hs132669579 | GAAGTCTTACACATTTGAGGGGG | 8715 |
| hs132669336 | ACACTTCTCTCTGTAAGTGGAGG | 8716 |
| hs132669696 | GAGGTGCTGAACAAATGAGTGGG | 8717 |
| hs132669288 | TTAGAGACACATTTACCATGAGG | 8718 |
| hs132669677 | ATGTTGATATCATACCCCATGGG | 8719 |
| hs132669738 | GCTGTGGAATACACTTGGGATGG | 8720 |
| hs132669396 | ATTAGCAAGGAAGTGAGTAGTGG | 8721 |
| hs132669302 | CAGAGCTCAAGAAATCTCTGTGG | 8722 |
| hs132669363 | CTATTAAATATGATCAAGAGTGG | 8723 |
| hs132669276 | ATAAAATTACAGGGAAACAGGGG | 8724 |
| hs132669920 | TTAAAAAAAAAAAAGGACCAAGG | 8725 |
| hs132669882 | TGGCAAGGACAGTAAAGAGGTGG | 8726 |
| hs132669859 | GGCAGACATCCCTTGAAGGGGGG | 8727 |
| hs132669904 | TTATTCGCCTGCTGTGATCGTGG | 8728 |
| hs132669683 | ATTTTTCTATCAAGTGACGTGGG | 8729 |
| hs132669387 | GACGCTTCCTTCCTTCACTGAGG | 8730 |
| hs132669580 | TGAAGTCTTACACATTTGAGGGG | 8731 |
| hs132669858 | TGGCAGACATCCCTTGAAGGGGG | 8732 |
| hs132669697 | GGAGGTGCTGAACAAATGAGTGG | 8733 |
| hs132669901 | ATTGTACCTCTCACATCTAGGGG | 8734 |
| hs132669756 | ATAAAAGCAACAGAATTGGAGGG | 8735 |
| hs132669273 | ACTCTTCATATAAAATTACAGGG | 8736 |
| hs132669832 | CATACATAGTCAAAGTGGCAAGG | 8737 |
| hs132669506 | AAAATACACCTAATAAAAGGAGG | 8738 |
| hs132669842 | TTATGTCAATCTCAGCTAGGTGG | 8739 |
| hs132669795 | ACTTGAATAATAGTAACTGTGGG | 8740 |
| hs132669607 | TTGGAGAATGAAGTGAGGCAAGG | 8741 |
| hs132669399 | CCATTGCAAGGCTGAACCAGAGG | 8742 |
| hs132669864 | GTTGCAATTTTAATTCCAGGAGG | 8743 |
| hs132669295 | TGATCGCACAAGGTGCAGGATGG | 8744 |
| hs132669473 | AACTCTGTTAGAATGTAGGAAGG | 8745 |
| hs132669739 | TAATGCTGTGGAATACACTTGGG | 8746 |
| hs132669326 | AAGATATTAACATTAATAGGAGG | 8747 |
| hs132669860 | GGATGTCTGCCATTAAGTGAAGG | 8748 |
| hs132669722 | AGAAACTAAAACTTCTGTGACGG | 8749 |
| hs132669871 | GAGCATTTAGCCTCCAGGAGAGG | 8750 |
| hs132669300 | GTGGACCCACAGATTAAGGTAGG | 8751 |
| hs132669307 | ATAGAACATGAAAGATTACTGGG | 8752 |
| hs132669913 | TATAGTGTGAAATTATGGAGGGG | 8753 |
| hs132669735 | AATACACTTGGGATGGTAGGAGG | 8754 |
| hs132669831 | GAACACATACATAGTCAAAGTGG | 8755 |
| hs132669590 | TACAGCTTCACAGATGCTGAGGG | 8756 |
| hs132669277 | TTTTATATGAAGAGTGTGAGTGG | 8757 |
| hs132669695 | ACGCAAACTTCACTGCACTTGGG | 8758 |
| hs132669210 | GTTCCGGGGTGACTGATAGTGGG | 8759 |
| hs132669805 | TTTCTCTAATCGCTAAACCAAGG | 8760 |
| hs132669643 | AAACTGTTCAGCTATATGGATGG | 8761 |
| hs132669596 | ATCTAGTTACTGAGGCAAGTAGG | 8762 |
| hs132669494 | AAAACTTACAAATTACCAAGAGG | 8763 |
| hs132669261 | GGATGCTGCATACTATTGGCAGG | 8764 |
| hs132669758 | GGAGGGAAAATACAATAGCAAGG | 8765 |
| hs132669224 | GTAATGAATTTAAAGTCCAAAGG | 8766 |
| hs132669376 | AGATTTATGTGACACTGGCAGGG | 8767 |
| hs132669428 | ATAGTGGTAGGTTAAAGAGCTGG | 8768 |
| hs132669319 | CATCTGGTTGGGGATTTTTGGGG | 8769 |
| hs132669378 | ACTGGCAGGGAAGTATCAAAGGG | 8770 |
| hs132669939 | AAAGGCACAGAAGCATGCACAGG | 8771 |
| hs132669715 | TTTTGGTTTATATCAGCAGGAGG | 8772 |
| hs132669592 | GTAGGTAAACTAGGCCAGTAGGG | 8773 |
| hs132669283 | ATAGCTGGTCCGAAGTATTGGGG | 8774 |
| hs132669395 | AGTTTTCTGGGTGATTAGCAAGG | 8775 |
| hs132669208 | GCATCTATTGGACATTGAGAAGG | 8776 |
| hs132669483 | ATGTCATTCCTCATAGACATTGG | 8777 |
| hs132669206 | TATGGAATGTTCGCATTTGGGGG | 8778 |
| hs132669482 | TCATTCCTCATAGACATTGGAGG | 8779 |
| hs132669801 | ACTAAAACTAAACAGAGAAGTGG | 8780 |
| hs132669427 | TTATTTCTGAGGATAGTGGTAGG | 8781 |
| hs132669667 | ACATTCGGTTAGGTTGCACATGG | 8782 |
| hs132669840 | AAGCTCTTGAATCTTCCCTAAGG | 8783 |
| hs132669586 | GAACTAGAGGACAATAGCGATGG | 8784 |
| hs132669609 | ATGAACACATTAGTTTTAGGGGG | 8785 |
| hs132669275 | TATAAAATTACAGGGAAACAGGG | 8786 |
| hs132669893 | TTAGTGGACCTGGTAAACACTGG | 8787 |
| hs132669622 | TAATAACTATGGCAATTAGTGGG | 8788 |
| hs132669569 | TGTTGCATGGCAATAATGAATGG | 8789 |
| hs132669467 | CAGATACGTTTTCATGTCCGGGG | 8790 |
| hs132669825 | AAAACGTGATTATGAAAAGAGGG | 8791 |
| hs132669388 | TCACAGGCCTCAGTGAAGGAAGG | 8792 |
| hs132669834 | AAAAGTCTATGTGATAGAAGTGG | 8793 |
| hs132669373 | TACCTTAAGTAGACTAGCAGTGG | 8794 |
| hs132669423 | TTTTTAACATAACCTTGCCAAGG | 8795 |
| hs132669630 | TTTCTGAACTATTTACTGTGAGG | 8796 |
| hs132669720 | TAAAACTTCTGTGACGGTAAGGG | 8797 |
| hs132669655 | GCAGATGTCATCAGGAGCCAAGG | 8798 |
| hs132669221 | CTATTTTCTATATCTTTGTGGGG | 8799 |
| hs132669570 | GGCAATAATGAATGGTCCATAGG | 8800 |
| hs132669299 | CATAGCCTACCTTAATCTGTGGG | 8801 |
| hs132669625 | ACCCTGCAACCTGATCTTGGAGG | 8802 |
| hs132669894 | TAGTGGACCTGGTAAACACTGGG | 8803 |
| hs132669600 | CTGCAAAGCCTGACACTGCATGG | 8804 |
| hs132669432 | GCACAGTCTTGGGTCACACAGGG | 8805 |
| hs132669218 | ACAAAGATATAGAAAATAGTGGG | 8806 |
| hs132669685 | AACAGAAGATATCTAAGTAGAGG | 8807 |
| hs132669744 | ATTGGCTTACTCCTCTTAAGGGG | 8808 |
| hs132669271 | TGGTATGTAACATTACATACAGG | 8809 |
| hs132669285 | TGATAACAACCCCAATACTTCGG | 8810 |
| hs132669397 | GCTAATCACCCAGAAAACTCTGG | 8811 |
| hs132669398 | GTGAGTAGTGGTCCATTGCAAGG | 8812 |
| hs132669263 | TATCCTCATACACTAATGCCAGG | 8813 |
| hs132669619 | GATGTCAGCATACTTCGTGTTGG | 8814 |
| hs132669338 | ACTGCCAACTGCCAAAGAATGGG | 8815 |
| hs132669389 | AAAGAGCATCAGTAAAGTGCAGG | 8816 |
| hs132669293 | CAGTGCAGCTTGATCGCACAAGG | 8817 |
| hs132669589 | TGAAGCTGTAGAAACCCTACTGG | 8818 |
| hs132669591 | CTACAGCTTCACAGATGCTGAGG | 8819 |
| hs132669422 | ATATTAGTTGTAAAATACACTGG | 8820 |
| hs132669767 | TTGCAGTTATTTTTTCACAATGG | 8821 |
| hs132669462 | GAGAGCTGTCATCCCACCCCCGG | 8822 |
| hs132669678 | TATGTTGATATCATACCCCATGG | 8823 |
| hs132669322 | TTTTGGGGTAGGGACCAGAATGG | 8824 |
| hs132669673 | GCTACTGCTTAATCACCCATGGG | 8825 |
| hs132669535 | TGCCACTTGTGAGGACCCAAGGG | 8826 |
| hs132669324 | GGGTAGGGACCAGAATGGCTGGG | 8827 |
| hs132669684 | TATTTTTCTATCAAGTGACGTGG | 8828 |
| hs132669420 | GAGTGGGGAGGTTAACCTCTGGG | 8829 |
| hs132669238 | AATTACACAACTTTATGTTGAGG | 8830 |
| hs132669841 | TTTTTATGTCAATCTCAGCTAGG | 8831 |
| hs132669645 | TAATATTTTTCAACTATCCGAGG | 8832 |
| hs132669201 | GTAATAAGTTGCTTTCAAAGAGG | 8833 |
| hs132669845 | TTAGCATTTCCATTCTCTAGTGG | 8834 |
| hs132669350 | ATCACACCTCCACAATCCTTAGG | 8835 |
| hs132669593 | AGTAGGTAAACTAGGCCAGTAGG | 8836 |
| hs132669434 | TGCACAGTCTTGGGTCACACAGG | 8837 |
| hs132669461 | TTTTGCCTATACCTACTGTCAGG | 8838 |
| hs132669914 | TTATAGTGTGAAATTATGGAGGG | 8839 |
| hs132669670 | CTATTGGACTAATAAGAAGTAGG | 8840 |
| hs132669289 | TCTGATTGCAATGTTCCTCATGG | 8841 |
| hs132669856 | AATGGCAGACATCCCTTGAAGGG | 8842 |
| hs132669627 | ACCTCCAAGATCAGGTTGCAGGG | 8843 |
| hs132669809 | AGGAAATAATGGCTTCCGACTGG | 8844 |
| hs132669560 | ATGAGTCTCGAAGTTTATTGTGG | 8845 |
| hs132669260 | GTGTGGATGCTGCATACTATTGG | 8846 |
| hs132669503 | GCCAGTAACTGTGAATTCTAGGG | 8847 |
| hs132669527 | GTGATAGTTTGAATAAAAGCCGG | 8848 |
| hs132669915 | ATTATAGTGTGAAATTATGGAGG | 8849 |
| hs132669382 | CTTTACTGAAGGGCATACTTGGG | 8850 |
| hs132669789 | AATCCTCTCCAGTTTGCCTAAGG | 8851 |
| hs132669814 | TTCTCTCTCTACCTAAGACAGGG | 8852 |
| hs132669386 | TGAAATAACTAGTAATGAAGAGG | 8853 |
| hs132669903 | ATCATCACCACGATCACAGCAGG | 8854 |
| hs132669548 | TTTTTATTTGTAATTTCTGGGGG | 8855 |
| hs132669479 | TTTGTCCTCCAATGTCTATGAGG | 8856 |
| hs132669400 | AGAGGAAGAAGCAAAATTGAAGG | 8857 |
| hs132669740 | TTAATGCTGTGGAATACACTTGG | 8858 |
| hs132669608 | TGCCTCACTTCATTCTCCAATGG | 8859 |
| hs132669425 | AGTATTATAAATCTTTACCTTGG | 8860 |
| hs132669924 | AATGTATTCAAATCCACAGTTGG | 8861 |
| hs132669357 | GCAAATAGTAGTCCATATGCTGG | 8862 |
| hs132669613 | GGAAAGAAGGTGCTGTAAAGAGG | 8863 |
| hs132669846 | TAGCATTTCCATTCTCTAGTGGG | 8864 |
| hs132669367 | ATTTTGTCCTATAGGAAGGAAGG | 8865 |
| hs132669705 | ATTTGACTCTGGAAATAAGATGG | 8866 |
| hs132669806 | TAATCGCTAAACCAAGGCTTAGG | 8867 |
| hs132669779 | CTGAGGCAATTAGAAAAGGCTGG | 8868 |
| hs132669543 | CCAGATGCACAGAGGTAACATGG | 8869 |
| hs132669287 | TTATTGTAAACACTCTCAAAAGG | 8870 |
| hs132669621 | GATACATGACATGCTCTCCTTGG | 8871 |
| hs132669930 | ATATTGACTTAATAAAAAAGAGG | 8872 |
| hs132669384 | CCCTTCCTTACTTTACTGAAGGG | 8873 |
| hs132669818 | TCCAAGTTGAAGCTAATCATTGG | 8874 |
| hs132669750 | GTTTTGTAATTGACCAGTATCGG | 8875 |
| hs132669337 | GACTGCCAACTGCCAAAGAATGG | 8876 |
| hs132669290 | AGATGAGATATCCATTTAAGTGG | 8877 |
| hs132669445 | CTTCAAGTCGTCATTTAGACGGG | 8878 |
| hs132669364 | CCCTAAACCTTCCTTCCTATAGG | 8879 |
| hs132669617 | ATACTTCGTGTTGGGAAAGAAGG | 8880 |
| hs132669838 | GAATAATTATTAAGAAGGCAAGG | 8881 |
| hs132669932 | TTTGAATAATGTTTTTCAAGAGG | 8882 |
| hs132669616 | GTATGCTGACATCTTGGGCTAGG | 8883 |
| hs132669444 | CCTTCAAGTCGTCATTTAGACGG | 8884 |
| hs132669379 | GTATGCCCTTCAGTAAAGTAAGG | 8885 |
| hs132669348 | CTGTTTTCAAACTTGTTCTGAGG | 8886 |
| hs132669891 | TAATAGATGGAGTAAATTAGTGG | 8887 |
| hs132669488 | CTATTAGGACCATCAAATACAGG | 8888 |
| hs132669475 | TTGGTAATCTAATTATCTGTCGG | 8889 |
| hs132669453 | GCAATAGAGAGCCGAGGGAGTGG | 8890 |
| hs132669294 | AGCTTGATCGCACAAGGTGCAGG | 8891 |
| hs132669861 | TCAAAAATTCCCCCCTTCAAGGG | 8892 |
| hs132669909 | ATAAGGTACATGTAAGATAGAGG | 8893 |
| hs132669749 | CATTTAAATCATATAAACATTGG | 8894 |
| hs132669745 | TTTTGTTAGAACCCCTTAAGAGG | 8895 |
| hs132669852 | ATCCCCATCCCACTAGAGAATGG | 8896 |
| hs132669672 | TGCTACTGCTTAATCACCCATGG | 8897 |
| hs132669524 | ATTGAGGTAATGTTTAAGTCCGG | 8898 |
| hs132669539 | CCAGACAACATGACTTGTTAGGG | 8899 |
| hs132669633 | TCATTTCTAGTTGTTGGATGGGG | 8900 |
| hs132669497 | TGTGAGCTCTTTAGGAAGACAGG | 8901 |
| hs132669231 | CTGGTTGTAGAGCTTACCGCTGG | 8902 |
| hs132669917 | GCATATCTAATGAGTTTCCTTGG | 8903 |
| hs132669225 | AATTTAAAGTCCAAAGGCCTAGG | 8904 |
| hs132669284 | CCAATACTTCGGACCAGCTATGG | 8905 |
| hs132669731 | TGGAAGTGCAAGAAGACAACTGG | 8906 |
| hs132669639 | TTTCTCACATTCCATTAAGTAGG | 8907 |
| hs132669470 | ATGAACATAAAGGAATTCAATGG | 8908 |
| hs132669668 | TGATAACGTGACATTCGGTTAGG | 8909 |
| hs132669402 | CCTCTGGTTCAGCCTTGCAATGG | 8910 |
| hs132669321 | GGTTGGGGATTTTTGGGGTAGGG | 8911 |
| hs132669457 | TTATTCTAATTCCACTCCCTCGG | 8912 |
| hs132669919 | AACTCATTAGATATGCTAGAAGG | 8913 |
| hs132669669 | ATAGATGATAACGTGACATTCGG | 8914 |
| hs132669335 | CTGTAAGTGGAGGTGAAGTCAGG | 8915 |
| hs132669810 | ATTATTTCCTGCCTAAGCCTTGG | 8916 |
| hs132669525 | TTATTCAAACTATCACAGATAGG | 8917 |
| hs132669660 | ATAGTTTTGATATTTCTGATTGG | 8918 |
| hs132669796 | CTATTATTCAAGTTGCATCTAGG | 8919 |
| hs132669237 | TTATCCCATGTCCCTGATGCTGG | 8920 |
| hs132669941 | AGTGACATTTTAATGTTTGGAGG | 8921 |
| hs132669353 | TCAGAATCCTTTCCAACAATGGG | 8922 |
| hs132669534 | CCTCACAAGTGGCAAATACCTGG | 8923 |
| hs132669484 | ATTGCTAGATTGCTAAACTTAGG | 8924 |
| hs132669836 | CAAAAGCTATACCAGCTAGAAGG | 8925 |
| hs132669829 | GTTCAGCAAAGCTTACATAATGG | 8926 |
| hs132669455 | AATTAGAATAAAGTAGTATAGGG | 8927 |
| hs132669657 | GATATATTCATATTTGTCCTTGG | 8928 |
| hs132669472 | CAGAAACTCTGTTAGAATGTAGG | 8929 |
| hs132669691 | ATTCGTTGCAGTAAATACTTTGG | 8930 |
| hs132669753 | TCTCCAGTCACAAATGAGTTTGG | 8931 |
| hs132669723 | ACAATTATCAGAAAAGTTGATGG | 8932 |
| hs132669889 | ATCTTAATATCGATAATAGATGG | 8933 |
| hs132669585 | TCTCATGCTAACTTTCTGAATGG | 8934 |
| hs132669815 | TTTCTCTCTCTACCTAAGACAGG | 8935 |
| hs132669804 | TAGAAATTATAGCATAGCTTTGG | 8936 |
| hs132669565 | TATGGTGTATCATTAAATATAGG | 8937 |
| hs132669650 | AATCAGGAAGATTGATTTGAGGG | 8938 |
| hs132669573 | TGATAAACGTTATAAATCTTGGG | 8939 |
| hs132669641 | ATATGGATGGAGGACAAAAATGG | 8940 |
| hs132669635 | CTTCATTTCTAGTTGTTGGATGG | 8941 |
| hs132669248 | CAGAAGATACTCGATCAATATGG | 8942 |
| hs132669786 | CCAGTTTGCCTAAGGAATAAGGG | 8943 |
| hs132669816 | AGATTACTAGTAAACAAAAATGG | 8944 |
| hs132669365 | CCTATAGGAAGGAAGGTTTAGGG | 8945 |
| hs132669687 | TGTGAAATAAAATCACAATTAGG | 8946 |
| hs132669250 | ATATGGAAACACTAATAATATGG | 8947 |
| hs132669391 | GTAAAGTGCAGGTGAATTATAGG | 8948 |
| hs132669820 | CATTCTCATGACCATGATAATGG | 8949 |
| hs132669370 | AATTGGATGCGAAGTATAATTGG | 8950 |
| hs132669200 | GCTTTCAAAGAGGTCATAATAGG | 8951 |
| hs132669830 | TTATCACATTAGAATTTAATAGG | 8952 |
| hs132669408 | CCAAAGATGGTTTAAATAAAGGG | 8953 |
| hs132669956 | TTAAGAAGACTAACAAGTTTTGG | 8954 |
| hs132669514 | AAAATTGTACTGATGAAAATTGG | 8955 |
| hs132669508 | ATACATTACCTCCTTTTATTAGG | 8956 |
| hs132669291 | AGTTTTTGCTTCCACTTAAATGG | 8957 |
| hs132669107 | GGAGTGTAAAGCGAAATCCAGGG | 8958 |
| hs132669142 | AGATCTTAGAGGACTCCTGGGGG | 8959 |
| hs132668681 | AGAAATACAATTATTCACAGAGG | 8960 |
| hs132668554 | TAAACACAGGAATAAATTAGGGG | 8961 |
| hs132668867 | TCTACAGTTTTGGCACACTGAGG | 8962 |
| hs132668978 | AAACCCTCATTATAGCACATGGG | 8963 |
| hs132668700 | ATACTTAGGAAATAAAGACATGG | 8964 |
| hs132668561 | TTATGGGATCTGGAGCACCCAGG | 8965 |
| hs132668974 | TGTACTATACTGAATGCTGGAGG | 8966 |
| hs132669081 | AATAAATAAATAATGCCTGGAGG | 8967 |
| hs132669141 | TAGATCTTAGAGGACTCCTGGGG | 8968 |
| hs132669030 | AAGCAATTGATCCTATATGGTGG | 8969 |
| hs132668775 | ACTCCTAAGCTACCAAATGGGGG | 8970 |
| hs132668550 | TATTTTGTAATGATGAACAGGGG | 8971 |
| hs132668718 | TGGGTATTCAATGAAGTCGGAGG | 8972 |
| hs132668551 | TGATGAACAGGGGTAAACACAGG | 8973 |
| hs132668663 | TCATAGATGAATTTATACAACGG | 8974 |
| hs132668981 | TATAGAGTATATATTCACATCGG | 8975 |
| hs132668653 | AATAAAGGCCTTGATCATTGGGG | 8976 |
| hs132669006 | TGTGATATATTTTTTCACAGGGG | 8977 |
| hs132668980 | TAGGTGACTGAGTTTCTAAGAGG | 8978 |
| hs132668906 | TAACAAGCATCATATTCCAAGGG | 8979 |
| hs132668971 | GGATTTAAGCCTGATCATGGAGG | 8980 |
| hs132668996 | GTGGCATGATGCTATTGAGGAGG | 8981 |
| hs132668543 | TGACAGCCTCACTTAATAGGGGG | 8982 |
| hs132669036 | TGTTGAAATGAAGATAGCAAAGG | 8983 |
| hs132668896 | GAAGACACTGACCTCTCCAATGG | 8984 |
| hs132669011 | CCCAAGAGTGAGTCTTTCTGGGG | 8985 |
| hs132668970 | GATTTAAGCCTGATCATGGAGGG | 8986 |
| hs132668633 | TGTACTCACCGTAAGTCCAGAGG | 8987 |
| hs132668924 | CATGGCTAACTTTCTGACAAGGG | 8988 |
| hs132668536 | AGGGTTCAGTTGAGACCAAGTGG | 8989 |
| hs132669121 | TAACTTCCAGTGTAGGCCAAGGG | 8990 |
| hs132668807 | TCTGTGATAACCATCAGATGAGG | 8991 |
| hs132669127 | AATGTGCCACATCGGAAAAGCGG | 8992 |
| hs132668916 | ACACCAGAGATAACATCACCAGG | 8993 |
| hs132669186 | ACACAGTAACACAGATGACATGG | 8994 |
| hs132668819 | CTATATGCAGAATGTATGGGTGG | 8995 |
| hs132669177 | TTGTGGATGAGAACAACGCAGGG | 8996 |
| hs132669128 | GCCACATCGGAAAAGCGGTACGG | 8997 |
| hs132668632 | GTACTCACCGTAAGTCCAGAGGG | 8998 |
| hs132669017 | CAATGTCTATGAAGGATGAGTGG | 8999 |
| hs132669166 | AAAAATGCTTTCTGGCAGCGAGG | 9000 |
| hs132669178 | TTTGTGGATGAGAACAACGCAGG | 9001 |
| hs132668804 | GTTCAAACTACCTCATCTGATGG | 9002 |
| hs132668568 | CAATAATAAATAGTGTAACAGGG | 9003 |
| hs132669159 | AGGCTCCTGCTCAATTCATGAGG | 9004 |
| hs132669053 | AGTTTGGTGATGCAGCAGATGGG | 9005 |
| hs132669110 | TTCTGATGTTCAGTGTTACGTGG | 9006 |
| hs132668549 | TTATTTTGTAATGATGAACAGGG | 9007 |
| hs132668542 | TCATTTCCCCCTATTAAGTGAGG | 9008 |
| hs132668724 | GCTGTTCATCATGAATTGGAAGG | 9009 |
| hs132669020 | TCCTTCATAGACATTGCTGTAGG | 9010 |
| hs132668528 | GTTTTCCCCAAACCCCCACATGG | 9011 |
| hs132668977 | GCACCCATGTGCTATAATGAGGG | 9012 |
| hs132668859 | CAGTGCTTAGATTTGGTAGGTGG | 9013 |
| hs132668808 | GCATGGGCAGACATATGTCATGG | 9014 |
| hs132668998 | AAGGATTTCCCTCGAAGGAGTGG | 9015 |
| hs132669126 | GAGAAGCAAATGTGCCACATCGG | 9016 |
| hs132668984 | TGTGCATAGATGCATAACCTTGG | 9017 |
| hs132669101 | AGCTAAGTACGGATAACCTAGGG | 9018 |
| hs132668582 | TATTCAAACTCTATGGCAGGTGG | 9019 |
| hs132668557 | AGGAGGCTGCTCTAGAACCAAGG | 9020 |
| hs132668894 | GAGGTCAGTGTCTTCTCATGAGG | 9021 |
| hs132669144 | CTGGGGGTCAATAATAGTAAGGG | 9022 |
| hs132669145 | GGGTCAATAATAGTAAGGGCTGG | 9023 |
| hs132669114 | ACGTAACACTGAACATCAGAAGG | 9024 |
| hs132668719 | TGTTGGGTATTCAATGAAGTCGG | 9025 |
| hs132668530 | TAATCTTTGTGCAATCAGGAAGG | 9026 |
| hs132668760 | CATATCATTCAGGCCAGCAAGGG | 9027 |
| hs132668938 | ACTCACTCTCATATTTAGCAAGG | 9028 |
| hs132669079 | AAGGGCATAAAGAGGCCAGAAGG | 9029 |
| hs132668744 | GGATTTCTTGGGAAATGATGGGG | 9030 |
| hs132668715 | CCATAGCTGAGTCTATGCTATGG | 9031 |
| hs132668941 | GACAGTGCCATAGGATCAAGTGG | 9032 |
| hs132668757 | TAGAGCCTAGCCCAGTGTAGAGG | 9033 |
| hs132669102 | TAGCTAAGTACGGATAACCTAGG | 9034 |
| hs132668576 | GCACGTTTGCCAGAAAGTAACGG | 9035 |
| hs132669120 | GTAACTTCCAGTGTAGGCCAAGG | 9036 |
| hs132669008 | TTTTTTCACAGGGGAATGAGAGG | 9037 |
| hs132668544 | GTGACAGCCTCACTTAATAGGGG | 9038 |
| hs132668587 | TGGAAGGGAACTTATTAGGATGG | 9039 |
| hs132668805 | TTATCACAGAAAAATTTGCATGG | 9040 |
| hs132668982 | CTATATTCTGACTTCAGTGAAGG | 9041 |
| hs132668710 | GGGTATCCTGTAAATTCGATGGG | 9042 |
| hs132668829 | TTATTGGGAGAGAGTTGGGGTGG | 9043 |
| hs132668995 | GCATCATGCCACTCCTTCGAGGG | 9044 |
| hs132668593 | TATAAGCTCTGGAATGTCAAAGG | 9045 |
| hs132668930 | TTAATGGTTATGATGGTAAGGGG | 9046 |
| hs132668781 | AATGCTTCTCAATAGCCTGAAGG | 9047 |
| hs132668674 | AATGGTAATGAAATTTAACTAGG | 9048 |
| hs132668961 | AGAGCAGAGAAACAGGAGGCCGG | 9049 |
| hs132668621 | ATTCTTGCCATATTGATCAAGGG | 9050 |
| hs132669104 | AATGTTAGCATAGCTAAGTACGG | 9051 |
| hs132668713 | CCATAGCATAGACTCAGCTATGG | 9052 |
| hs132668806 | TATCACAGAAAAATTTGCATGGG | 9053 |
| hs132668725 | GCGTTCTGTGTTGTTTCTAGGGG | 9054 |
| hs132668642 | TAGCTGTAAGACAAAAGCTATGG | 9055 |
| hs132668832 | TGATTATCCTCCTGCTCAGACGG | 9056 |
| hs132668875 | GTTATGAACAGAATTTCTAGTGG | 9057 |
| hs132668787 | CTACATATGGAAAAGGACATAGG | 9058 |
| hs132668617 | AAATCAGAACAACTAAGTAATGG | 9059 |
| hs132668794 | AGTCAGAATGTATTAGATGAGGG | 9060 |
| hs132668816 | GCATGGATTGTAGAAAGAGTAGG | 9061 |
| hs132668539 | GCCTTTCTAACTTACAAATGTGG | 9062 |
| hs132668862 | AATCTCAGTGTAAGAATGCAAGG | 9063 |
| hs132669044 | TTAAATTCTGCTCAGATCAGAGG | 9064 |
| hs132668815 | GATTGTAGAAAGAGTAGGAAAGG | 9065 |
| hs132668571 | TTTGTTACATAACACAAGAGTGG | 9066 |
| hs132668590 | TATAGTGTTCTAAAATGTTGAGG | 9067 |
| hs132668523 | GTCATAGCAGAAAATTGGCTTGG | 9068 |
| hs132668893 | TCCTTTAAACACCATTGGAGAGG | 9069 |
| hs132668878 | TCAACCTTATATTTTAACACGGG | 9070 |
| hs132668736 | TTAATTCAAGACATCTGGACAGG | 9071 |
| hs132668637 | GCAAATCTACTCCAGCACTCTGG | 9072 |
| hs132668748 | CCTTCTACCACCTCTACACTGGG | 9073 |
| hs132669097 | ACTTCCTTCATAGCTGCCCTAGG | 9074 |
| hs132668836 | ATATAGGCTTATGATAAGAATGG | 9075 |
| hs132668844 | AAACATAGAGTAAGCAGTAGTGG | 9076 |
| hs132668907 | TTAACAAGCATCATATTCCAAGG | 9077 |
| hs132668594 | ATAAAACTCTTTTTGCCATGAGG | 9078 |
| hs132668527 | AATGTTAAGAAAGGTACAGCAGG | 9079 |
| hs132668864 | ATAAATAGTGATGCTCAAAAGGG | 9080 |
| hs132668707 | ATAGAAAACAAAAACAAGGATGG | 9081 |
| hs132668750 | GTAGAAGGAATGGGGCATAGAGG | 9082 |
| hs132668630 | GTACAAGGAAATAAAGGAGTGGG | 9083 |
| hs132669119 | CTGCATGTAACTTCCAGTGTAGG | 9084 |
| hs132668589 | GCTTCGAAAATAAGAAGCCTAGG | 9085 |
| hs132668703 | CATGGAATTATGTAAGGCTAGGG | 9086 |
| hs132668902 | GTAAAATAAGAATATGGGCATGG | 9087 |
| hs132668613 | AAGAAGTGTAAGAAAAACATTGG | 9088 |
| hs132669056 | AGATGGGAGTTGCTTTTGTGGGG | 9089 |
| hs132669163 | TTTCTTATCCAAAATTATGAGGG | 9090 |
| hs132668934 | CTTTCATTAAGCACTTATGAGGG | 9091 |
| hs132668858 | GTACAGTGCTTAGATTTGGTAGG | 9092 |
| hs132668676 | TGACATTTGACAACAAACATTGG | 9093 |
| hs132668697 | ACACATGTAAAATAATACTTAGG | 9094 |
| hs132668625 | AATCTAACACAAGAACCCTCTGG | 9095 |
| hs132668534 | CTTGGTCTCAACTGAACCCTAGG | 9096 |
| hs132668721 | AGTACCGGCAATTAGCTGTTGGG | 9097 |
| hs132668782 | ATGCTTCTCAATAGCCTGAAGGG | 9098 |
| hs132668991 | TTACTATTAATGAAAGCTCAAGG | 9099 |
| hs132669019 | GATGAGTGGTTTCTCCCAAATGG | 9100 |
| hs132669000 | TGATGTTGACAAAGAATGAAAGG | 9101 |
| hs132668801 | TACACTACATTAATAAAAGTAGG | 9102 |
| hs132668776 | CCATTTGGTAGCTTAGGAGTTGG | 9103 |
| hs132668931 | TTTAATGGTTATGATGGTAAGGG | 9104 |
| hs132668679 | TTAATGTTACATCTCACTGTTGG | 9105 |
| hs132669041 | CTCTCTCTCTCTCAACTGGAGGG | 9106 |
| hs132668796 | CTAATAGACATCATAAGTGCAGG | 9107 |
| hs132669133 | TTTCCTGATGGCATAGCAGACGG | 9108 |
| hs132668797 | ACTTATGATGTCTATTAGAAAGG | 9109 |
| hs132668770 | GAATATCAAAAGCTTTTCTAGGG | 9110 |
| hs132668526 | GAGAAGACAAATGTTAAGAAAGG | 9111 |
| hs132669042 | GCTCTCTCTCTCTCAACTGGAGG | 9112 |
| hs132668960 | AGGCCGGAAAACATGTTAAGAGG | 9113 |
| hs132669140 | CTAGATCTTAGAGGACTCCTGGG | 9114 |
| hs132668646 | TATGAACTATGCAACGTTCAGGG | 9115 |
| hs132669052 | AAGTTTGGTGATGCAGCAGATGG | 9116 |
| hs132668936 | CACTTATGAGGGCAAAAGACAGG | 9117 |
| hs132668942 | GTTAAGTTTGACAGTGCCATAGG | 9118 |
| hs132669039 | GCTTCTGTATATTCTGTGACAGG | 9119 |
| hs132668840 | AGAGGAAAAAGAGACTATAAGGG | 9120 |
| hs132668846 | ATCTAGACATTCCCAATCCTGGG | 9121 |
| hs132668842 | TTAAAGAACTACAGGAGTAATGG | 9122 |
| hs132669010 | CCCCAGAAAGACTCACTCTTGGG | 9123 |
| hs132668810 | GACAGTCCCTAATCACGAAATGG | 9124 |
| hs132668615 | TAAGAGTTGGATTCATTCCATGG | 9125 |
| hs132669082 | TTTATTTAAAGGGCATAAAGAGG | 9126 |
| hs132668573 | AAGAGTGGAGAAACAAGTTTGGG | 9127 |
| hs132669183 | TCATCTGTGTTACTGTGTATAGG | 9128 |
| hs132668913 | CTATTAAGATATTTGCATATGGG | 9129 |
| hs132668567 | ATAAATAGTGTAACAGGGTAAGG | 9130 |
| hs132668874 | TCATAACAGAAATATTAAACAGG | 9131 |
| hs132669073 | GTGCTCAAATAGTTAAAAGTAGG | 9132 |
| hs132668788 | CTATGTCCTTTTCCATATGTAGG | 9133 |
| hs132668717 | AATACCCAACAGCTAATTGCCGG | 9134 |
| hs132668813 | AGGAAAGGCAAGAGAATTGAGGG | 9135 |
| hs132668752 | GTAGAGGTGGTAGAAGGAATGGG | 9136 |
| hs132668854 | GCTCTAGTCTCTAGGATCTCAGG | 9137 |
| hs132668779 | AGTCTTTCAGAACCCCCATTTGG | 9138 |
| hs132669181 | TTAAAAAATACAGCATAGCTAGG | 9139 |
| hs132668609 | GTGGCCAGTGTATCATAAGTTGG | 9140 |
| hs132668517 | TGAAATGATTTGCTCTCAAATGG | 9141 |
| hs132669025 | GTAACCAAGAAAAGTTCAATTGG | 9142 |
| hs132668914 | GGGAATGCAACAGAGATAGAAGG | 9143 |
| hs132669029 | CTTTACCTTACCTAATTGCCAGG | 9144 |
| hs132668668 | CATTTTTGTGTACTTCTCTAGGG | 9145 |
| hs132668772 | CCAACTCCTAAGCTACCAAATGG | 9146 |
| hs132669080 | TTAAATAAATAAATAATGCCTGG | 9147 |
| hs132669174 | CCTGGAAGACAGACTTCATAGGG | 9148 |
| hs132668714 | GACTCAGCTATGGAAAGAACAGG | 9149 |
| hs132669131 | GAGCACCTGAAGAAGAAGTTAGG | 9150 |
| hs132668917 | TTACCTGGTGATGTTATCTCTGG | 9151 |
| hs132669089 | AATTTCATAGTCATTAGAAATGG | 9152 |
| hs132668985 | GTCTAAATCTCTCAAAAGAATGG | 9153 |
| hs132668616 | TTAAAAGACTCAATAAGAGTTGG | 9154 |
| hs132668921 | GATAATTTCAATTAAAACGTTGG | 9155 |
| hs132668847 | ATTGGGAATGTCTAGATAGAAGG | 9156 |
| hs132668821 | GTAACTATATGCAGAATGTATGG | 9157 |
| hs132669105 | TCTTTTGGAGCTCTTCTCCCTGG | 9158 |
| hs132668958 | TGACAACAAAAATTGTAAACAGG | 9159 |
| hs132668698 | TTTACATGTGTTCTAAGAAAGGG | 9160 |
| hs132669143 | CCTGGGGGTCAATAATAGTAAGG | 9161 |
| hs132668691 | GGCTCTTGTCCATGTCAAGTTGG | 9162 |
| hs132668892 | TTTTTTCCTTTAAACACCATTGG | 9163 |
| hs132668891 | AACTCAGTAAATTAGAAATAGGG | 9164 |
| hs132668843 | CCTGTAGTTCTTTAAAATAGAGG | 9165 |
| hs132668565 | GTAACAGGGTAAGGTCTTATGGG | 9166 |
| hs132668908 | ATTATTTTGACATAAATGATTGG | 9167 |
| hs132668612 | TTACATGTAAAAATGAAAACTGG | 9168 |
| hs132668946 | GGGCAATTGGGACTTGAGATTGG | 9169 |
| hs132668537 | ATTATTCTGGTTTTATCCTAGGG | 9170 |
| hs132668519 | GTTTTAGGTTAATAAAAAATGGG | 9171 |
| hs132668920 | ATAATTTCAATTAAAACGTTGGG | 9172 |
| hs132668973 | TACAAGACATCGTAAATGATTGG | 9173 |
| hs132669116 | ACTTCAACTTCCAAAAGTATTGG | 9174 |
| hs132668592 | TGGAATGTCAAAGGCATGATAGG | 9175 |
| hs132668754 | CCCAGTGTAGAGGTGGTAGAAGG | 9176 |
| hs132668624 | CATCTCACAACTCTCTTTAGTGG | 9177 |
| hs132668940 | GGATCAAGTGGTGCTTTTAGTGG | 9178 |
| hs132668580 | TCTTAGGTATTCAAACTCTATGG | 9179 |
| hs132668591 | TGACATTCCAGAGCTTATAATGG | 9180 |
| hs132668857 | GCTTGTACAGTGCTTAGATTTGG | 9181 |
| hs132668541 | GCCACATTTGTAAGTTAGAAAGG | 9182 |
| hs132668545 | TGTGACAGCCTCACTTAATAGGG | 9183 |
| hs132668898 | TCAAGACTCTGTCATCTTAGAGG | 9184 |
| hs132668643 | CATTTGAAGTCTGAGAAAATAGG | 9185 |
| hs132668784 | GTATTTATTGAGTCCCCTTCAGG | 9186 |
| hs132668683 | TAAATAAGTCTCTAGTTAAAGGG | 9187 |
| hs132668871 | GGTAGTACTCTCTTATTCATTGG | 9188 |
| hs132668553 | GTAAACACAGGAATAAATTAGGG | 9189 |
| hs132668623 | ATATAAACCCTTGATCAATATGG | 9190 |
| hs132668905 | CTTGTTAATAGAATTCTTATGGG | 9191 |
| hs132668524 | TGAGCGTCATAGCAGAAAATTGG | 9192 |
| hs132668654 | TTATTCATGGATTCCTAGTTTGG | 9193 |
| hs132669137 | TCTTAAATGCTAGATCTTAGAGG | 9194 |
| hs132668766 | TTTCCATGAAGATCTATTTACGG | 9195 |
| hs132668945 | AGATTGGTAATTAAGAAAATAGG | 9196 |
| hs132668965 | GTTTAATTTCTCATGAATAATGG | 9197 |
| hs132668711 | GCTTCTCCCATCGAATTTACAGG | 9198 |
| hs132669118 | TTAAATGTGTCCAATACTTTTGG | 9199 |
| hs132668664 | TATACAACGGAGATTTATATTGG | 9200 |
| hs132668803 | TTAATGTAGTGTAAATAAATTGG | 9201 |
| hs132668596 | TTTTGCCATGAGGCCAAAAATGG | 9202 |
| hs132668937 | AGTGCTTAATGAAAGTTTAATGG | 9203 |
| hs132668574 | GGACATTTCCCGTTACTTTCTGG | 9204 |
| hs132668096 | GTATAACATATGGTACAGGGCGG | 9205 |
| hs132668025 | CCATGCTCAGATCCACAACGGGG | 9206 |
| hs132668325 | AGATGTATTGAAGGTCTGTGTGG | 9207 |
| hs132668193 | CCCACCATACAAAATTACAGGGG | 9208 |
| hs132668355 | GGAATGCTTAGAAAGAGATGTGG | 9209 |
| hs132668065 | CACACAATGCATCAGCAACGGGG | 9210 |
| hs132668294 | CAATAAACAGTATCACGCAGAGG | 9211 |
| hs132667922 | ATGTGTATTAACCCACCTAGAGG | 9212 |
| hs132668104 | TTTAGCTGTCACTTCCAAAGGGG | 9213 |
| hs132668151 | CAAGGAGCTCAGAGTCTGCGAGG | 9214 |
| hs132668243 | AGTCGTCTGTTTAAACCCGGTGG | 9215 |
| hs132668026 | TGCTCAGATCCACAACGGGGAGG | 9216 |
| hs132668225 | GTGTAACATGAGTATCACACAGG | 9217 |
| hs132668463 | GAAGGCAGTAGCCATTAAAGGGG | 9218 |
| hs132668395 | TCTGTTGAAATGCCATCCAGAGG | 9219 |
| hs132668274 | AGGTTTATAGCTATGTCCTGAGG | 9220 |
| hs132668505 | GATACAATAGTAACTAACTGCGG | 9221 |
| hs132668095 | ACTGTATAACATATGGTACAGGG | 9222 |
| hs132668058 | CAGGCGTATATCCACTAAGGCGG | 9223 |
| hs132668349 | AACGCAACAGATGATTCCTGAGG | 9224 |
| hs132668176 | GAGTTGGCATGAGACATAGAGGG | 9225 |
| hs132668043 | GAAAATCTGACAAGCCTGGGAGG | 9226 |
| hs132668036 | ATAGCAACTCAACCAAACAAAGG | 9227 |
| hs132668479 | CAGTCCGTAGAACTCACAGATGG | 9228 |
| hs132668401 | TGTGGTGATGAGGGATGCCAGGG | 9229 |
| hs132668289 | TTTACGTGCTGAAAATTCTGGGG | 9230 |
| hs132668031 | TGACATGTGAATTAAATGGGAGG | 9231 |
| hs132668069 | CGGGGCTTTATGAAAGAGGGAGG | 9232 |
| hs132668070 | CCCGTTGCTGATGCATTGTGTGG | 9233 |
| hs132668425 | CTAGAATTATAATATACCCAGGG | 9234 |
| hs132668385 | TGGTAAAGAGGTACAGATGGGGG | 9235 |
| hs132667934 | CAGTGATGCGAGATACCCACAGG | 9236 |
| hs132668340 | AATGGTAAATCAAGAGAGCGTGG | 9237 |
| hs132668023 | GTCCATGCTCAGATCCACAACGG | 9238 |
| hs132668116 | TTAATCTAATCTGCTTCACAAGG | 9239 |
| hs132668049 | CCTGGCTCCAGTAAATTCAAGGG | 9240 |
| hs132668362 | AATCTGCAGTAACATTGCTGAGG | 9241 |
| hs132668458 | AAGATTGAAGACAAAAGAGGAGG | 9242 |
| hs132667892 | ATGTACGCTAGAAGTTGGAAGGG | 9243 |
| hs132668157 | CTACTGTCGTTATCAATAGGTGG | 9244 |
| hs132668503 | AATAGTAACTAACTGCGGATGGG | 9245 |
| hs132668363 | ATCTGCAGTAACATTGCTGAGGG | 9246 |
| hs132668477 | ACTCACAGATGGTTGTATGGTGG | 9247 |
| hs132668082 | TCCATTATGAGGCAGAAATGTGG | 9248 |
| hs132667931 | TACACGCATGGGTAAACAGAAGG | 9249 |
| hs132668447 | TTGGGACTGAAGGAACTGATGGG | 9250 |
| hs132668068 | CAACGGGGCTTTATGAAAGAGGG | 9251 |
| hs132668163 | GTTCTAAGACAAAAGTTGGGTGG | 9252 |
| hs132668260 | ATTGTGATGGTGAAAAAGGAAGG | 9253 |
| hs132667989 | TGTTAAACAAGAGTATGTATGGG | 9254 |
| hs132668133 | ATCCCAATTGAACAGACTGGTGG | 9255 |
| hs132667944 | TTACCTGACATGCACTGACAGGG | 9256 |
| hs132668234 | TGAAGTTCTCTACAGAATGAGGG | 9257 |
| hs132668421 | TGTTTAATACTGGACTGAGAGGG | 9258 |
| hs132668177 | AGAGTTGGCATGAGACATAGAGG | 9259 |
| hs132667923 | TGTGTTAATATCCTCTAGGTGGG | 9260 |
| hs132668108 | ATAATGGTATTCATTCAGTAGGG | 9261 |
| hs132668090 | TGAGAACCAAGCCATACCCTTGG | 9262 |
| hs132668030 | TCATATTGTTGTACGTGCCAAGG | 9263 |
| hs132668143 | CAAGCTACCAAGGAATGCCTGGG | 9264 |
| hs132667936 | TAAGCTCGCACATTTCCTGTGGG | 9265 |
| hs132668451 | CAGCATTAAAAGGAATCAAGTGG | 9266 |
| hs132667894 | TTCCAACTTCTAGCGTACATAGG | 9267 |
| hs132668046 | ATACTTAAGATTTACCTCCCAGG | 9268 |
| hs132668012 | GTAAGAAATTGGATAAAATGGGG | 9269 |
| hs132667994 | ATGGCATCACAAAAATGTATGGG | 9270 |
| hs132668246 | CAAAGAGGTCGTAACATACAGGG | 9271 |
| hs132668086 | ACTGAATAGTGTTTAGCCAAGGG | 9272 |
| hs132668440 | TAAAGTATAGAACTCAAGCATGG | 9273 |
| hs132668161 | TCTAAGACAAAAGTTGGGTGGGG | 9274 |
| hs132668014 | GGTTTCTAATCCTAATACAGTGG | 9275 |
| hs132668063 | ACCACACAATGCATCAGCAACGG | 9276 |
| hs132667917 | CTATAAAGTGCATCATAATGAGG | 9277 |
| hs132668222 | GTTAAAATAACAAAGCCACTTGG | 9278 |
| hs132668485 | TTTTCAATATAATTCATCCAAGG | 9279 |
| hs132668336 | CTGTTTCTAATAAAGAAAGAAGG | 9280 |
| hs132668145 | GAGGAAACCTCAAGCTACCAAGG | 9281 |
| hs132668277 | TTCCATTAACCACTCCTACAGGG | 9282 |
| hs132668134 | GGTATCCCAATTGAACAGACTGG | 9283 |
| hs132668242 | CAGAGTCGTCTGTTTAAACCCGG | 9284 |
| hs132667897 | AAGAGACAAGCAATATGAAGTGG | 9285 |
| hs132668278 | TCCATTAACCACTCCTACAGGGG | 9286 |
| hs132668379 | CTTCCTTATTGGACTAAATGGGG | 9287 |
| hs132668480 | TAACCACACAAGCATCACCTTGG | 9288 |
| hs132668383 | ACCTCTTTACCAAAGACAGCTGG | 9289 |
| hs132668005 | TTTGAGTGATTCCAGAGCTGAGG | 9290 |
| hs132668017 | CATTATTGCTAAAAGCTCAAGGG | 9291 |
| hs132667961 | TAAGCTTGTAACCCCATAGGTGG | 9292 |
| hs132667937 | TTAAGCTCGCACATTTCCTGTGG | 9293 |
| hs132668402 | GATGAGGGATGCCAGGGCGAAGG | 9294 |
| hs132668059 | GCGGAAACAATTATGTGCCATGG | 9295 |
| hs132668433 | GGACGAGAAGATGGTACAGAAGG | 9296 |
| hs132668249 | AGCTTGTATGAATCAAATGCAGG | 9297 |
| hs132668487 | GGGTCAGCTAATGATGAAATGGG | 9298 |
| hs132668432 | CGAGAAGATGGTACAGAAGGAGG | 9299 |
| hs132668312 | GGATCAGATTATTAAACATGAGG | 9300 |
| hs132668387 | TTTGGTAAAGAGGTACAGATGGG | 9301 |
| hs132668048 | CCTTGAATTTACTGGAGCCAGGG | 9302 |
| hs132668194 | ACCCACCATACAAAATTACAGGG | 9303 |
| hs132668111 | GCATCTGGATATCTCACTGTAGG | 9304 |
| hs132668403 | TGCCAGGGCGAAGGAAGAGAAGG | 9305 |
| hs132668253 | ACAAGTCTATAGAGACTGGTAGG | 9306 |
| hs132668155 | GTGCAAGACATTAACCTCAAAGG | 9307 |
| hs132668076 | AGAAATAAGGGATTTTCAGAGGG | 9308 |
| hs132668004 | TTGAGTGATTCCAGAGCTGAGGG | 9309 |
| hs132668450 | TCAAAGAAAAGTTATAGCAAGGG | 9310 |
| hs132668374 | ATTTTTAGAGTTCTAACTCAGGG | 9311 |
| hs132668367 | GTTTGAAGAAAACCAAAGACAGG | 9312 |
| hs132668087 | ATAGTGTTTAGCCAAGGGTATGG | 9313 |
| hs132668287 | ACGTAAATCAGATACTAGAAAGG | 9314 |
| hs132668131 | GATACCAGAAAATAAAGAGCAGG | 9315 |
| hs132668172 | CTTTACAATTTTAAACAACAGGG | 9316 |
| hs132668301 | AATTGGCTGATCCAATGGAATGG | 9317 |
| hs132668109 | GTTGTGTAGCACAAATTAGAAGG | 9318 |
| hs132668292 | CTTTCTCTATGAGTGTTCGTGGG | 9319 |
| hs132667927 | CCTAGTCACTTAGAAATAGGTGG | 9320 |
| hs132667891 | TATGTACGCTAGAAGTTGGAAGG | 9321 |
| hs132667930 | TTAAAAAAAAATACACGCATGGG | 9322 |
| hs132668164 | ATGGTTCTAAGACAAAAGTTGGG | 9323 |
| hs132668347 | CTAAGATCTAAATCATACATTGG | 9324 |
| hs132668015 | TTTTTTTTTCTCTAGAGAAGAGG | 9325 |
| hs132668055 | CTCTTAACGCCAATACTGATGGG | 9326 |
| hs132668067 | GCAACGGGGCTTTATGAAAGAGG | 9327 |
| hs132668346 | AGATCTAAATCATACATTGGAGG | 9328 |
| hs132668223 | AGTATCACACAGGTTACAAAGGG | 9329 |
| hs132668439 | ACTATTGGCTGGAATTGTCGTGG | 9330 |
| hs132668204 | TATGTACTAATGCAATTGAGTGG | 9331 |
| hs132668085 | TACTGAATAGTGTTTAGCCAAGG | 9332 |
| hs132667883 | CCAGGTATTGGGAGATCGATGGG | 9333 |
| hs132667960 | TTTTAAGCTTGTAACCCCATAGG | 9334 |
| hs132668268 | GAATTAGTTTGAGATACAAAGGG | 9335 |
| hs132668105 | AAAATTCCTTGAGTTCAGACAGG | 9336 |
| hs132668028 | CCCCGTTGTGGATCTGAGCATGG | 9337 |
| hs132668475 | ACAACCATCTGTGAGTTCTACGG | 9338 |
| hs132668267 | TTACATTTATATCTATAGATGGG | 9339 |
| hs132667915 | TTGTGATGCTTTCTATGCAAAGG | 9340 |
| hs132668060 | GCCTTAGTGGATATACGCCTGGG | 9341 |
| hs132667911 | ATTTTCTTCTACAATCCAAATGG | 9342 |
| hs132668455 | GACACTACAGAGCTATATAGAGG | 9343 |
| hs132668411 | ACTCAGAGAAGGATCTTAGCAGG | 9344 |
| hs132668146 | GGTATAAAACGATAAGGAAGAGG | 9345 |
| hs132667975 | AAATTCTGAGATGTACTAATGGG | 9346 |
| hs132667910 | TCTTCTACAATCCAAATGGTAGG | 9347 |
| hs132668457 | AAGAAGATTGAAGACAAAAGAGG | 9348 |
| hs132668002 | AAGACTATATCCCTCAGCTCTGG | 9349 |
| hs132668042 | GAGGAAAATCTGACAAGCCTGGG | 9350 |
| hs132668264 | TTAAAAAATAACTAATCATAGGG | 9351 |
| hs132668192 | GGAAATATAAGCAAGTATGCTGG | 9352 |
| hs132668269 | TGAATTAGTTTGAGATACAAAGG | 9353 |
| hs132668103 | TTTTAGCTGTCACTTCCAAAGGG | 9354 |
| hs132668390 | GCCAGCTGTCTTTGGTAAAGAGG | 9355 |
| hs132668321 | TTATATGGCAGAAATTCTCCTGG | 9356 |
| hs132668281 | TGTGTAAAGTGTGCCCCTGTAGG | 9357 |
| hs132668166 | ATTGAAAGATCCAAAAAAGATGG | 9358 |
| hs132668492 | GGGAAGCAGGGGTTGAAGGGAGG | 9359 |
| hs132668088 | GTTTAGCCAAGGGTATGGCTTGG | 9360 |
| hs132668179 | TTAGAATTTGTGATTTCTTGTGG | 9361 |
| hs132667952 | TAGATCTGCATCATCACGTCAGG | 9362 |
| hs132668247 | ACCTCTTTGCACATACCACCGGG | 9363 |
| hs132668427 | CTGGGTATATTATAATTCTAGGG | 9364 |
| hs132668142 | CCTGGGAATGTGATGAATGCTGG | 9365 |
| hs132668399 | TGAAGGAATTGTGGTGATGAGGG | 9366 |
| hs132668434 | AGAAGAAGAGGACGAGAAGATGG | 9367 |
| hs132668150 | GACTCTGAGCTCCTTGAGGTGGG | 9368 |
| hs132668149 | CTGCGAGGTATAAAACGATAAGG | 9369 |
| hs132668368 | TTTTCCAAAGAAGACTCTAAAGG | 9370 |
| hs132667957 | TCTTCTTCACTGGAGTTGATGGG | 9371 |
| hs132668202 | CTAATGCAATCGAGTGTGACAGG | 9372 |
| hs132668405 | AGGAAGAGAAGGCGTGAGATGGG | 9373 |
| hs132668391 | ATCCTTTTTGAGCCTCTGGATGG | 9374 |
| hs132668493 | GCTGGGAAGCAGGGGTTGAAGGG | 9375 |
| hs132667987 | TTTGCAATTCTTTAACGGGTTGG | 9376 |
| hs132668304 | CAATTTGTAGAAATACTTTGTGG | 9377 |
| hs132668258 | TATCAGAAGCAGACAGAAGTTGG | 9378 |
| hs132668446 | TTTGGGACTGAAGGAACTGATGG | 9379 |
| hs132668282 | GCCCCAGCTAAATCCTCAAATGG | 9380 |
| hs132667935 | GCATCACTGTTTGAGCGCTATGG | 9381 |
| hs132668300 | AATGGAATGGAATGAATTTGAGG | 9382 |
| hs132668137 | CCAGCATTCATCACATTCCCAGG | 9383 |
| hs132668141 | AGGCATTCCTTGGTAGCTTGAGG | 9384 |
| hs132668474 | AAACAAATACAGAAGAGTATAGG | 9385 |
| hs132667908 | TTTCAATTAAGAGTCTTTTGAGG | 9386 |
| hs132668497 | TTAAATAAGGCTGGGAAGCAGGG | 9387 |
| hs132668314 | TATTTTCAAGAAGGAAAACCTGG | 9388 |
| hs132668273 | TAAACCTTCTAAGTTAATATGGG | 9389 |
| hs132668348 | GCTTAAAGAAAACTTTCCTCAGG | 9390 |
| hs132668394 | TCAACAGAATTTTAGTGCAATGG | 9391 |
| hs132668305 | AATGTCATCTGATATAAAGTTGG | 9392 |
| hs132668024 | TCCATGCTCAGATCCACAACGGG | 9393 |
| hs132668352 | AATGAGCAAATGTTAAAGAATGG | 9394 |
| hs132668215 | AATAGAAGTTATTTATGAAGAGG | 9395 |
| hs132668317 | ATAAAAATAATTATAAAGAATGG | 9396 |
| hs132668489 | GCAGACATTTTTCTAAGGCATGG | 9397 |
| hs132668453 | ATCTAGACTAGTATCTAAAAGGG | 9398 |
| hs132668462 | GGAAGGCAGTAGCCATTAAAGGG | 9399 |
| hs132668315 | CAAGTATTCTATTTTCAAGAAGG | 9400 |
| hs132668007 | ATAGCCATTCAGGCAATGATAGG | 9401 |
| hs132668074 | TAGCAGAGAAGTGTATTATAGGG | 9402 |
| hs132668032 | ATATGACATGTGAATTAAATGGG | 9403 |
| hs132667890 | CTCCTATGTACGCTAGAAGTTGG | 9404 |
| hs132668044 | TGGGAGGTAAATCTTAAGTATGG | 9405 |
| hs132668437 | ATCTCTGTTTCAAAGTCAAATGG | 9406 |
| hs132667949 | GCATCATCACGTCAGGTAGATGG | 9407 |
| hs132667966 | AATTATACATTTCCACCTATGGG | 9408 |
| hs132667995 | TATGGCATCACAAAAATGTATGG | 9409 |
| hs132667980 | GATATAAAGAACACTTTAAGTGG | 9410 |
| hs132668372 | TACATGCAGATATATCCTATTGG | 9411 |
| hs132668173 | CAACAGGGCCATATTCCAATAGG | 9412 |
| hs132668110 | ATCCAGATGCCGAATCCCTTTGG | 9413 |
| hs132668471 | CAAAGACATCTACTAAATATCGG | 9414 |
| hs132668276 | ATTCCATTAACCACTCCTACAGG | 9415 |
| hs132668375 | ACTCTAAAAATACTTCCAATAGG | 9416 |
| hs132668328 | GAATAACATACCTAAAAATAGGG | 9417 |
| hs132668406 | CGCCTTCTCTTCCTTCGCCCTGG | 9418 |
| hs132668190 | TCCCCTGTAATTTTGTATGGTGG | 9419 |
| hs132667904 | GTAAAAGGTGTATTTTCCTTAGG | 9420 |
| hs132668369 | TTTAGAGTCTTCTTTGGAAAAGG | 9421 |
| hs132668156 | CTACTACTGTCGTTATCAATAGG | 9422 |
| hs132668279 | GCCCCTGTAGGAGTGGTTAATGG | 9423 |
| hs132668358 | GCGTAGAGAGTCTGTTTCATAGG | 9424 |
| hs132667981 | TTATGATTCAGCTAATATCTAGG | 9425 |
| hs132668165 | GATGGTTCTAAGACAAAAGTTGG | 9426 |
| hs132668407 | GATGGGCACTCAACACTAATAGG | 9427 |
| hs132668270 | GTTTTCTGACTTAAAACAATAGG | 9428 |
| hs132668393 | TGCCATCCAGAGGCTCAAAAAGG | 9429 |
| hs132667909 | AATGAGAATTGCCTACCATTTGG | 9430 |
| hs132668378 | TCTTCCTTATTGGACTAAATGGG | 9431 |
| hs132668189 | ATTTCCCCTGTAATTTTGTATGG | 9432 |
| hs132667939 | ACTGCTTCGTAATAATTAGATGG | 9433 |
| hs132668235 | ATGCTTCTACTAGATAAGATTGG | 9434 |
| hs132668241 | ATATCCAACCGTCTGTTCATAGG | 9435 |
| hs132668020 | TGTGAGACTTTGTAATTCATTGG | 9436 |
| hs132668019 | AATTACAAAGTCTCACAAAATGG | 9437 |
| hs132667943 | TAAAATGGCACGTAACAAAATGG | 9438 |
| hs132668170 | ACACAGTGAAACATTTTAGAAGG | 9439 |
| hs132667941 | TCAGTGCATGTCAGGTAAAATGG | 9440 |
| hs132668239 | AAGATTTTTTTGACTTAAAAGGG | 9441 |
| hs132667928 | TCTCCTAGTCACTTAGAAATAGG | 9442 |
| hs132668364 | GAGAGAAAGAATCTAATTATCGG | 9443 |
| hs132667979 | TGTTCTTTATATCCAAATAATGG | 9444 |
| hs132668084 | GCCACATTTCTGCCTCATAATGG | 9445 |
| hs132668016 | CTGAGTTTCTATTTACGTATAGG | 9446 |
| hs132668091 | TGAAGCACCATACTATAAAATGG | 9447 |
| hs132667899 | TATTATACCACTATATAAAATGG | 9448 |
| hs132668237 | GTGGAGTGCAAGAAAATAAAAGG | 9449 |
| hs132667903 | TTGCAGTGAGAACAAGTAAAAGG | 9450 |
| hs132667999 | AATATTGCTAAGCAATAAATAGG | 9451 |
| hs132668356 | TATATAGTCTTCAGTTTTAGAGG | 9452 |
| hs132668444 | ACTCAAGCATGGATTCTTTTGGG | 9453 |
| hs132668322 | GAGAATTTCTGCCATATAAAAGG | 9454 |
| hs132668125 | TCACTGCTGTTATTCTTTGCAGG | 9455 |
| hs132668361 | AGTCTTGTCCTTAACTTTAGAGG | 9456 |
| hs132667906 | AGTTAGACTTTTATTCTTTAGGG | 9457 |
| hs132668009 | GTTAGACAAGTGTAAGAAATTGG | 9458 |
| hs132668230 | TCACTGTTGGTCAAAATAATTGG | 9459 |
| hs132667870 | CTAGC | 9460 |
| | TGTAAAAGACACGGGG | |
| | GG | |
| hs132667871 | ACTAG | 9461 |
| | CTGTAAAAGACACGGG | |
| | GG | |
| hs132667872 | AACTA | 9462 |
| | GCTGTAAAAGACACGG | |
| | GG | |
| hs132667874 | GAAAC | 9463 |
| | TAGCTGTAAAAGACAC | |
| | GG | |
| hs132667867 | TGCAG | 9464 |
| | TGCCTTTTTAGTGCAT | |
| | GG | |
| hs132667744 | GTAAATGTATTTCTGCTGTGGGG | 9465 |
| hs132667669 | AGAGCTCTAGAAAATTCAGGTGG | 9466 |
| hs132667700 | GCGTATTCCTGATGAGAGTGAGG | 9467 |
| hs132667816 | GGAAGATGTTTGATGGTACGAGG | 9468 |
| hs132667653 | CCCTCAGTTAATAATCCTGGGGG | 9469 |
| hs132667789 | AGAGCATTTTTATGGCCCTGAGG | 9470 |
| hs132667773 | TAGTGAAAACTGGTGACAGATGG | 9471 |
| hs132667734 | GCTGGGGAAGGACAGCTCTGGGG | 9472 |
| hs132667541 | TGAACCGAATGTTAAAACTGTGG | 9473 |
| hs132667804 | TCGAGATCAAGAAAAAACACAGG | 9474 |
| hs132667633 | TCATTTGTTTAGGTACCATGAGG | 9475 |
| hs132667762 | CAAGCAGGACACAATCCCATGGG | 9476 |
| hs132667680 | GGAATGTAGACCTACCTCCAAGG | 9477 |
| hs132667801 | ACACTAAGACATCCAGACTCAGG | 9478 |
| hs132667610 | GTGGGGGTTTAGCAATAGGTAGG | 9479 |
| hs132667649 | CCAGGATTATTAACTGAGGGAGG | 9480 |
| hs132667573 | TGTATTTGCTGCCAAATATGGGG | 9481 |
| hs132667770 | TAGTATCACTGATAACCCATGGG | 9482 |
| hs132667608 | AAATAAAACTCACGGTGTGGGGG | 9483 |
| hs132667844 | TCTCATTCTCAAAACACTCGAGG | 9484 |
| hs132667631 | AAAACCTATGAGTAACCTCATGG | 9485 |
| hs132667683 | GACCTACCTCCAAGGTAGGGAGG | 9486 |
| hs132667551 | AAGTTCCTGTGAGCTGTGGAGGG | 9487 |
| hs132667748 | AGAATCACGTAAATTATCGTGGG | 9488 |
| hs132667600 | ACTGAACTATAACATACTCCAGG | 9489 |
| hs132667790 | AGAAATCTTGGCTAGCCTCAGGG | 9490 |
| hs132667636 | TGGCTTAATAATAAAACAGGAGG | 9491 |
| hs132667555 | TGTAACCCTCCACAGCTCACAGG | 9492 |
| hs132667566 | CTGACTTAATCTGTAAACAAAGG | 9493 |
| hs132667654 | TCCCTCAGTTAATAATCCTGGGG | 9494 |
| hs132667839 | TTAAACTCATAGTATCAGACCGG | 9495 |
| hs132667704 | GTAACTACACATAATATAGGTGG | 9496 |
| hs132667648 | CCCCCAGGATTATTAACTGAGGG | 9497 |
| hs132667516 | AAAGATCACAGAATAAGCCTGGG | 9498 |
| hs132667675 | AGAGAATGTGTACAAGGCAAAGG | 9499 |
| hs132667861 | TGAAAGCTAGAAAGTACATACGG | 9500 |
| hs132667761 | GCAAGCAGGACACAATCCCATGG | 9501 |
| hs132667565 | GGGAGTAATGTTCAGTACCCAGG | 9502 |
| hs132667682 | GTAGACCTACCTCCAAGGTAGGG | 9503 |
| hs132667778 | TTCACTGCCTGAGTCAGCAAAGG | 9504 |
| hs132667529 | GAATTCCGTCAGGAATTAAGGGG | 9505 |
| hs132667771 | ATAGTATCACTGATAACCCATGG | 9506 |
| hs132667593 | TGAACTGCAGAATGCTCTAGTGG | 9507 |
| hs132667629 | ATTTGGAAACATGTCAGAAGAGG | 9508 |
| hs132667588 | CTAAGTAGCCCATTTTGGCATGG | 9509 |
| hs132667818 | TTTTTGTAATTCTTTTTGGTAGG | 9510 |
| hs132667568 | TTTGTTTACAGATTAAGTCAGGG | 9511 |
| hs132667538 | ATAATCACAGCATTTCAGAATGG | 9512 |
| hs132667514 | GTTTTAACAGGTTTTAAAAGCGG | 9513 |
| hs132667840 | TCATTTCTAGTAAAAGAGGCCGG | 9514 |
| hs132667724 | AGATATTCTCAAATGGCTGTGGG | 9515 |
| hs132667666 | ACATATCAATAATTAACCATAGG | 9516 |
| hs132667578 | TGTCATGACAATTTGCTCTGTGG | 9517 |
| hs132667622 | TCTGAGTAAGTAAGTCAAAGAGG | 9518 |
| hs132667852 | GCTGCTTAGAACTTTATGAAAGG | 9519 |
| hs132667646 | CCCAGTTCCAGAACTCCCCCAGG | 9520 |
| hs132667835 | TGGTACGTATTTAAAATGAGTGG | 9521 |
| hs132667589 | TTAGATTGTCCTTTTCAGGAAGG | 9522 |
| hs132667854 | AAGTGGGAAAAAACTATAGGTGG | 9523 |
| hs132667713 | AATTATTTGAGGGCCATCCCAGG | 9524 |
| hs132667527 | GATTTCCCCTTAATTCCTGACGG | 9525 |
| hs132667694 | TGTATCCTTACAAAAGGCCCAGG | 9526 |
| hs132667768 | TGTCCTGCTTGCCATTGAGGTGG | 9527 |
| hs132667536 | TGAGAAAATGAGAATGGCTAAGG | 9528 |
| hs132667546 | AGTAAAAGAACTAAGTCGCTGGG | 9529 |
| hs132667708 | ATCACCAGTTGTACTTTGGGAGG | 9530 |
| hs132667728 | TAAGGGCTACAGAAGTACTTAGG | 9531 |
| hs132667687 | GTACAGTCAATAAATCAGACTGG | 9532 |
| hs132667732 | AGGACAGCTCTGGGGAAGCAGGG | 9533 |
| hs132667723 | TCAAATGGCTGTGGGATCAAAGG | 9534 |
| hs132667572 | CCAAATATGGGGTTGTTAAGTGG | 9535 |
| hs132667559 | ATTCCTTTCAAATCAACCAAAGG | 9536 |
| hs132667719 | CTACCTTTACCTCAACTCCTGGG | 9537 |
| hs132667643 | ATGAGTATCAAAAATGATGATGG | 9538 |
| hs132667794 | AGTTGCAGTTATTTTTTCCAAGG | 9539 |
| hs132667518 | TGGTGTATGGAATGCAACCCAGG | 9540 |
| hs132667725 | AAGATATTCTCAAATGGCTGTGG | 9541 |
| hs132667759 | ATCCCCACCTCCCACCTCAATGG | 9542 |
| hs132667614 | TATGGCTCTCAGCTTGGGACAGG | 9543 |
| hs132667612 | TTGCATTAGTACTAGAACAAAGG | 9544 |
| hs132667533 | GTTTTCGTTTGAATTCCGTCAGG | 9545 |
| hs132667624 | GCCATATGTGTAAGGCTGAATGG | 9546 |
| hs132667743 | ATTTCTGCTGTGGGGACTGTTGG | 9547 |
| hs132667644 | ACTCATATCTAAAATTTACTAGG | 9548 |
| hs132667780 | CAAATTCTAGACCAGCTGTCAGG | 9549 |
| hs132667856 | CTACTTTTCTGAATTAAAGTGGG | 9550 |
| hs132667823 | AGTTTTGGCCTGCAGCTGATGGG | 9551 |
| hs132667717 | GTAAAGGTAGCAAGTCAAACAGG | 9552 |
| hs132667672 | TGAATTTTCTAGAGCTCTATGGG | 9553 |
| hs132667710 | TCAACCTCCCAAAGTACAACTGG | 9554 |
| hs132667522 | TCAAAAGTTCAGAAAAATAGAGG | 9555 |
| hs132667859 | ATAGTGATAATATACAGTACTGG | 9556 |
| hs132667795 | CCAAGGAATCAACTGATATGAGG | 9557 |
| hs132667689 | TACCTTCCTCCCTACCTTGGAGG | 9558 |
| hs132667558 | TTCCTTTCAAATCAACCAAAGGG | 9559 |
| hs132667596 | GTAAAAGACAAACTAATTGAAGG | 9560 |
| hs132667712 | TGTCTGAATTAATTATTTGAGGG | 9561 |
| hs132667632 | GGTACCATGAGGTTACTCATAGG | 9562 |
| hs132667830 | TTAAATTAAAAGACCAATGAGGG | 9563 |
| hs132667645 | ATGATGGCAGATTAGTTGTTTGG | 9564 |
| hs132667635 | AAGCCACATGAAGAAACATTTGG | 9565 |
| hs132667820 | ATTCTTTTGCAAACTCTCAATGG | 9566 |
| hs132667539 | GTTTCCACAGTTTTAACATTCGG | 9567 |
| hs132667772 | CCTAGACATGTAGTGAAAACTGG | 9568 |
| hs132667832 | CCATAAATGCTAACCCTCATTGG | 9569 |
| hs132667554 | TCCACAGCTCACAGGAACTTTGG | 9570 |
| hs132667553 | GGAGGGTTACAAACTCCCTTTGG | 9571 |
| hs132667806 | TTACACATGTAAAGTTCATTAGG | 9572 |
| hs132667809 | CTAAGAACAACTTTCTTGATTGG | 9573 |
| hs132667547 | ACTTAGTTCTTTTACTTAATGGG | 9574 |
| hs132667601 | GCTTTGTTTCCCCTTAAAAATGG | 9575 |
| hs132667543 | TGGATGCTACAAAAATTTTATGG | 9576 |
| hs132667544 | ACCAGATGTTAATTGATTAATGG | 9577 |
| hs132667845 | GAGATTTCTTTGGCAATAAATGG | 9578 |
| hs132667105 | AGACAGGAGAGGGACTACGAAGG | 9579 |
| hs132667274 | GTAGACCTCTTTGTACAAGGGGG | 9580 |
| hs132667013 | ATAATGATTACCATCCCAAGAGG | 9581 |
| hs132667332 | AATACCTGGACACAAGCTGAGGG | 9582 |
| hs132667188 | ATAAGTTTTAATGGGCATGGAGG | 9583 |
| hs132667380 | TAGACAAGAAAGCATTTGAGGGG | 9584 |
| hs132667017 | GTTTCCAAGGAAGTCACAAGAGG | 9585 |
| hs132667103 | TTAGGAAATATAGACAGGAGAGG | 9586 |
| hs132667484 | CTTCCAGCCCAATAGTAACGGGG | 9587 |
| hs132667130 | AAACCATCATCTATGACATGAGG | 9588 |
| hs132667001 | AGGCCATCACCTCAATACATGGG | 9589 |
| hs132667397 | AAATTATGAGACCACCACCTAGG | 9590 |
| hs132667357 | GGAAAAGAGAAATTAAAAGGAGG | 9591 |
| hs132667036 | ATCTCCCTGCCTCATACACGAGG | 9592 |
| hs132667046 | GCTGAAATAAGAAGATCCTGAGG | 9593 |
| hs132666968 | GTCAAACTGTAGGAAATAAGGGG | 9594 |
| hs132667205 | AAGCTGAGTTACTAATCACAAGG | 9595 |
| hs132667438 | GGCAGATCACATAAAACAGGAGG | 9596 |
| hs132667203 | AAAAGATCAGATGGTCACAAAGG | 9597 |
| hs132666998 | TTTGTGAGCCAAGACATGAGAGG | 9598 |
| hs132667407 | TCACATTTCAGGGAGCATTGTGG | 9599 |
| hs132667383 | ATACAATGAAGATAAAATGGAGG | 9600 |
| hs132667111 | TATTCAGCAGCTGAACCACAAGG | 9601 |
| hs132667342 | TTCTTTATATGAGTACAACTGGG | 9602 |
| hs132666994 | CTGCCAAAAGTATGAACAGGAGG | 9603 |
| hs132666955 | TCAGTAAAGACTGCTTGGAGTGG | 9604 |
| hs132667362 | CTGTTTTTGAGCTCACAGGAAGG | 9605 |
| hs132667333 | TAATACCTGGACACAAGCTGAGG | 9606 |
| hs132666972 | GTTTGACCAATATATTGAAGGGG | 9607 |
| hs132667096 | AGTTCTACCCTATATTTACAGGG | 9608 |
| hs132667037 | GGACTGATTCCTTTCATGTGAGG | 9609 |
| hs132666952 | TGTGAGAAGTATTGAAACAGAGG | 9610 |
| hs132667435 | ATGTATTGCAAAGAAGCCATGGG | 9611 |
| hs132667038 | CAGTCCTCGTGTATGAGGCAGGG | 9612 |
| hs132667033 | TTTGCCAAGAGGTAAGGGAAGGG | 9613 |
| hs132667326 | TAATAACTCTTGCTATCTGGAGG | 9614 |
| hs132667052 | ACATATCTTTACCTATGTGAGGG | 9615 |
| hs132667011 | AACGTTACAATCGTCATGAGAGG | 9616 |
| hs132667335 | TGAAAAAATAATCAGCTAGGAGG | 9617 |
| hs132667178 | AATACTGAAATTGTAAACAATGG | 9618 |
| hs132667134 | ACAATGCTAGACATAAACATTGG | 9619 |
| hs132667222 | CAGTGTTAGATGGTATGTAGAGG | 9620 |
| hs132667493 | TTTTTATTTAACTAAACACAGGG | 9621 |
| hs132667088 | CAACATGATATACTGTGAAGCGG | 9622 |
| hs132667149 | AGCATCCTGATATTATTCCAGGG | 9623 |
| hs132667401 | AAAAAGTAGTCCCATTCCAAGGG | 9624 |
| hs132667426 | TTTATGGCAGCAATAATCTGTGG | 9625 |
| hs132667385 | ATACATGCTGTAATGCATGTTGG | 9626 |
| hs132667489 | GTCTTGTTGTTGGAGAATGGTGG | 9627 |
| hs132667320 | TATGTTTATAAAAAATTACAGGG | 9628 |
| hs132667456 | TCTATATTGAGACAAGTACATGG | 9629 |
| hs132667424 | AATGGCAATCTTTCTTAACACGG | 9630 |
| hs132667192 | AAAAACCAACTCCACAGGCATGG | 9631 |
| hs132667488 | GTTGTTGGAGAATGGTGGTGAGG | 9632 |
| hs132667481 | GGAACTGAGTGACTTAGAGCAGG | 9633 |
| hs132667392 | CATCACGTCAATTGCCTAGGTGG | 9634 |
| hs132667016 | ATATAAGTTGGATTGCCAGAAGG | 9635 |
| hs132667416 | GAGCTGTAACAGTTAACTGTAGG | 9636 |
| hs132667271 | TATATCCCCCTTGTACAAAGAGG | 9637 |
| hs132667348 | AATGGTTAAAACCTATTGTGAGG | 9638 |
| hs132667471 | TTAGTTATACTAACACATACGGG | 9639 |
| hs132667112 | AGAATTTTATAGAAACCTTGTGG | 9640 |
| hs132667120 | GCATACTGGTATTTTTCACGTGG | 9641 |
| hs132667236 | TTTTTTAGCTGCCTTTCCAGTGG | 9642 |
| hs132667476 | GAGCAGGCGAACAAAATGCTGGG | 9643 |
| hs132667322 | TTTTTAAAGAAGTCAATCCAGGG | 9644 |
| hs132667324 | AGGCTTACAATGAGAAAAGAGGG | 9645 |
| hs132667197 | GCCTTGTGCTACCATGCCTGTGG | 9646 |
| hs132667073 | ACTTTCTTTGCATACAGTGGAGG | 9647 |
| hs132667454 | ACATCTGATAAGTAGCACTTAGG | 9648 |
| hs132666963 | TTGGTTCACTGAAATAGCAAGGG | 9649 |
| hs132667237 | GCCTTTCCAGTGGCAAAAGTAGG | 9650 |
| hs132667104 | TAGGAAATATAGACAGGAGAGGG | 9651 |
| hs132667391 | AGACATCACGTCAATTGCCTAGG | 9652 |
| hs132667459 | AAATTCATAGCTCAATGCACAGG | 9653 |
| hs132667132 | TTATGGTATATGAATGTGGATGG | 9654 |
| hs132667235 | AACATCCTATCCCTATTCAAAGG | 9655 |
| hs132667446 | ACTGTGATTGAAAATCATATAGG | 9656 |
| hs132667483 | GCTGGAAGAAATTCACTCTAGGG | 9657 |
| hs132667277 | TTGTAGACCTCTTTGTACAAGGG | 9658 |
| hs132667220 | GTATGTAGAGGAAGGCCAGATGG | 9659 |
| hs132666997 | GATGGATGAACTGTTGCCCCCGG | 9660 |
| hs132667202 | TCCTTGGGCAAAAGATCAGATGG | 9661 |
| hs132667028 | GCTCCTTTGCTTGTAACCAGAGG | 9662 |
| hs132667226 | ACACATTCTATAATTAGGGATGG | 9663 |
| hs132667313 | AATCACATGTGCTGTTGAAAGGG | 9664 |
| hs132667299 | GAACTGCCATGTACAAGAAGAGG | 9665 |
| hs132667451 | AAGTTTGTAGTATTGCCTCCAGG | 9666 |
| hs132667487 | CCATTCTCCAACAACAAGACAGG | 9667 |
| hs132667109 | TGTCCAAAGCCAAGAAACATTGG | 9668 |
| hs132666988 | CCTGTTCATACTTTTGGCAGCGG | 9669 |
| hs132667444 | TTATTATGTAATGATTGTGTGGG | 9670 |
| hs132667247 | TTACAGACAATGCATTTACAAGG | 9671 |
| hs132666974 | AGTTTGACCAATATATTGAAGGG | 9672 |
| hs132667146 | ATGTAATCTTATGAGTAAGAAGG | 9673 |
| hs132667334 | GATTTGACTTGAATAATACCTGG | 9674 |
| hs132667152 | CTGCAAGAAGAGGCACACCCTGG | 9675 |
| hs132667431 | TGGAAGCAATGGGTACATATGGG | 9676 |
| hs132667083 | TGGATACATGTGCCCATGGAGGG | 9677 |
| hs132667139 | TCACTCAATGCATTAGAATGAGG | 9678 |
| hs132667208 | TGTATGCTACATTCAGCTATGGG | 9679 |
| hs132667014 | GGCAATCCAACTTATATGCAAGG | 9680 |
| hs132667093 | TTCTTATTTCTCCATCCCGAAGG | 9681 |
| hs132667291 | TGCCGAAGCAAGCACCTGATGGG | 9682 |
| hs132667317 | ATATATATCGATCAGGGCCAAGG | 9683 |
| hs132667376 | TGTAGTTCAGTGTGTCTGGAGGG | 9684 |
| hs132666962 | TTTGGTTCACTGAAATAGCAAGG | 9685 |
| hs132667330 | AATACCCTCAGCTTGTGTCCAGG | 9686 |
| hs132667144 | CTATCTTTTCTAAACGCTCAGGG | 9687 |
| hs132667021 | CTGCCTCTGGTTACAAGCAAAGG | 9688 |
| hs132667062 | GAGAAGATAAAACCTGTGCTTGG | 9689 |
| hs132667338 | GACCTTTTGAAGCAGTTGCATGG | 9690 |
| hs132667053 | TTACCTATGTGAGGGACTGAAGG | 9691 |
| hs132667145 | TGAGCGTTTAGAAAAGATAGTGG | 9692 |
| hs132667381 | ATAGACAAGAAAGCATTTGAGGG | 9693 |
| hs132667465 | TTTTGTCTTATGTAGTTGGATGG | 9694 |
| hs132667437 | ATGGCTTCTTTGCAATACATTGG | 9695 |
| hs132667234 | AGTCTCCTTTGAATAGGGATAGG | 9696 |
| hs132667170 | TGAGCATAGCTGATAAGAGTTGG | 9697 |
| hs132667227 | GGATGGATATTATCAAGTATAGG | 9698 |
| hs132667077 | TATAACTGCATGAATTAGCTTGG | 9699 |
| hs132667228 | ATATTATCAAGTATAGGCTTAGG | 9700 |
| hs132667395 | TGGTGGTCTCATAATTTCTAGGG | 9701 |
| hs132667060 | TTTCTACATTTGCCAAGCACAGG | 9702 |
| hs132667447 | TGATTGAAAATCATATAGGCTGG | 9703 |
| hs132667486 | TTCTTCCAGCCCAATAGTAACGG | 9704 |
| hs132666983 | TGAGTTCCCATATTCATCACTGG | 9705 |
| hs132667455 | ATGTACTTGTCTCAATATAGAGG | 9706 |
| hs132667300 | AATTTGCCTCTTCTTGTACATGG | 9707 |
| hs132667042 | GGAATCAGTCCTCGTGTATGAGG | 9708 |
| hs132667287 | TTGGGTATAATAAAAAGCACTGG | 9709 |
| hs132667155 | TGTGTTATTTTGATAGGCCTGGG | 9710 |
| hs132667092 | CTACTTCATTTCCTTCGGGATGG | 9711 |
| hs132667477 | AGAGCAGGCGAACAAAATGCTGG | 9712 |
| hs132667184 | TCTATGTATATGTAACCCTTTGG | 9713 |
| hs132667439 | TGTTTTATGTGATCTGCCCATGG | 9714 |
| hs132667000 | GAGGCCATCACCTCAATACATGG | 9715 |
| hs132667427 | GCAATAATCTGTGGAAGCAATGG | 9716 |
| hs132667159 | ATGTGCATTTTTTAAACAAGTGG | 9717 |
| hs132667098 | TTATTCTGATTGTATGAAGTAGG | 9718 |
| hs132667031 | CTGAATTTGCCAAGAGGTAAGGG | 9719 |
| hs132667189 | AACTTATTGATCACTCCAAAGGG | 9720 |
| hs132667412 | ATGCTCCCTGAAATGTGAAAAGG | 9721 |
| hs132667289 | GGAGTTTTAAATCTCCCATCAGG | 9722 |
| hs132667480 | GTTCCCCGTTACTATTGGGCTGG | 9723 |
| hs132667119 | ATCGTCCCTATTTTGCCGTAAGG | 9724 |
| hs132667418 | CCTAAACATGTCCCTTAAAAGGG | 9725 |
| hs132667301 | ATATGTATTTTATCTTAAAGAGG | 9726 |
| hs132667464 | CAACTACATAAGACAAAAAGAGG | 9727 |
| hs132667201 | TGAACTTTGGGAGAATCCTTGGG | 9728 |
| hs132667086 | CATTTCCCTTTACCCTCCATGGG | 9729 |
| hs132667337 | TGCCATGCAACTGCTTCAAAAGG | 9730 |
| hs132666989 | CTGTTCATACTTTTGGCAGCGGG | 9731 |
| hs132667350 | ACATTTTCTATAATGATTGTGGG | 9732 |
| hs132667213 | ATATTATATGATAATTAAGAAGG | 9733 |
| hs132667194 | GTGGAGTTGGTTTTTAAGCATGG | 9734 |
| hs132667039 | TCAGTCCTCGTGTATGAGGCAGG | 9735 |
| hs132667294 | CAGGATATAGATGATATAGAAGG | 9736 |
| hs132667151 | GCACACCCTGGAATAATATCAGG | 9737 |
| hs132667399 | ACTGATTTGATTATTCCAATTGG | 9738 |
| hs132667018 | AACAGACCTTGCATATAAGTTGG | 9739 |
| hs132667157 | GAGCATAGTTTGTTTTTCCCAGG | 9740 |
| hs132667415 | TCTAGTTCATTTGCATTGCATGG | 9741 |
| hs132667297 | TTTTGGGCATCCTTGAATGTAGG | 9742 |
| hs132667085 | ATGTGCCCATGGAGGGTAAAGGG | 9743 |
| hs132667463 | ACATATTCTGCCACATAGCCTGG | 9744 |
| hs132667206 | CTTTATCTTATGAAGTATAGAGG | 9745 |
| hs132666957 | GAGAAACTGTTCTTGCTTGTTGG | 9746 |
| hs132667494 | ACACAGGGCAAAAACTAATCTGG | 9747 |
| hs132667095 | GCATTCACCCTGTAAATATAGGG | 9748 |
| hs132667250 | TCTCAAATACCTATTATAGTTGG | 9749 |
| hs132667136 | AATATCTTATAGAAGAACTTTGG | 9750 |
| hs132667440 | ATAGTACTAAAACTACTATTAGG | 9751 |
| hs132667485 | TCTTCCAGCCCAATAGTAACGGG | 9752 |
| hs132667254 | AGTTACATCTCAAATAACTTTGG | 9753 |
| hs132667117 | AGGAACCTTACGGCAAAATAGGG | 9754 |
| hs132666977 | AATGTTCTAGGCAATGGAATTGG | 9755 |
| hs132667078 | GCACAAATGTTCTATGAGATTGG | 9756 |
| hs132667318 | GCAGTTTTTTCTAATTGCCTTGG | 9757 |
| hs132667496 | ATCTGGTTGCTTCTTTTGTAGGG | 9758 |
| hs132667421 | TTGACGTGCATCCCTTTTAAGGG | 9759 |
| hs132667225 | TTCATTACTTCAGTGTTAGATGG | 9760 |
| hs132667233 | AATTAAGTCTCCTTTGAATAGGG | 9761 |
| hs132667186 | AGTGATCAATAAGTTTTAATGGG | 9762 |
| hs132667365 | GGATTGATCCAAATCTTTGCTGG | 9763 |
| hs132667370 | ATTTATTTCTAGCCCACAATAGG | 9764 |
| hs132667331 | GGGTATTTAAGTTGATTAGAAGG | 9765 |
| hs132667498 | ATAGTCTGTAGCATGATAATTGG | 9766 |
| hs132667268 | GTTTAATTAAAAATACTCTAAGG | 9767 |
| hs132667224 | TGAAACACATTCTATAATTAGGG | 9768 |
| hs132667091 | AATACTACTTCATTTCCTTCGGG | 9769 |
| hs132666992 | ATACTTTTGGCAGCGGGCCGGGG | 9770 |
| hs132666967 | GGTCAAACTGTAGGAAATAAGGG | 9771 |
| hs132667212 | ATTATTGTCAAATACTTAGAAGG | 9772 |
| hs132667429 | AGATTATTGCTGCCATAAAATGG | 9773 |
| hs132666960 | TGTTTTATCTGACTTAAGTTTGG | 9774 |
| hs132667099 | TCATGTACTAAATTTCCTTATGG | 9775 |
| hs132667387 | GTATCTCTTCACTTGCTCATAGG | 9776 |
| hs132667371 | GTGGGCTAGAAATAAATAAAAGG | 9777 |
| hs132666964 | TTAGCGCCCCTTCAATATATTGG | 9778 |
| hs132667319 | GTATGTTTATAAAAAATTACAGG | 9779 |
| hs132667071 | AAGAAAATGCAGTTTTTAGTAGG | 9780 |
| hs132667230 | TTTTTTTGTCAGGAGATAATAGG | 9781 |
| hs132667110 | TAGAATTCTTTGATTGACTATGG | 9782 |
| hs132667479 | CTCAGTTCCCCGTTACTATTGGG | 9783 |
| hs132667059 | ATCCTTTTAGCCTACCAAAATGG | 9784 |
| hs132667267 | GTATTTTTAATTAAACTTACTGG | 9785 |
| hs132666987 | TTACCTCCTGTTCATACTTTTGG | 9786 |
| hs132667045 | TCTTATTTCAGCTTCCAAATTGG | 9787 |
| hs132667165 | ATAATATGTAAATAATTAAATGG | 9788 |
| hs132667265 | ACTAGTCGTGGAGAGCTTTCAGG | 9789 |
| hs132667253 | TTGCTATCTCCAACTATAATAGG | 9790 |
| hs132666675 | AGTCTCACAAAACTGCAGAGCGG | 9791 |
| hs132666123 | GCTTTGTGGAGTCAACACCATGG | 9792 |
| hs132666149 | TAACCTATTCATAAGCACAGAGG | 9793 |
| hs132666112 | ATGGTTTAGACACAGAACTGGGG | 9794 |
| hs132666823 | CTTCAGATGATACAAAAACGGGG | 9795 |
| hs132666413 | CAAGGAGTGTGAAAACACGTGGG | 9796 |
| hs132666766 | CTGAGCCATATACCTCACTGTGG | 9797 |
| hs132666773 | ACAGAACTAGAGATGTCAGGTGG | 9798 |
| hs132666374 | AACAATGTGACAGATGACAGAGG | 9799 |
| hs132666082 | GTGAATTTGAAAGTGACTGGTGG | 9800 |
| hs132666415 | GCAAAAACTGCATGACCCAGAGG | 9801 |
| hs132666761 | GGGCAGTTCTCTCCACAGTGAGG | 9802 |
| hs132666915 | CTATAGGTGATAAACTACTGTGG | 9803 |
| hs132666190 | ACTCAGGGAGAGTACATGGGAGG | 9804 |
| hs132666329 | CCATGTGGAAACAAGCAGAGAGG | 9805 |
| hs132666571 | GATGACTTGGACCCTGTGGGAGG | 9806 |
| hs132666871 | TCCAAGCACTCTACTCACGATGG | 9807 |
| hs132666787 | AAGATGGAGGAAGATTGTGGTGG | 9808 |
| hs132666876 | TAGCCAAGCTGACACAACCAGGG | 9809 |
| hs132666259 | TTCAAAATATCAAAAGCCTGGGG | 9810 |
| hs132666201 | GGTCTGAGTAGGATCCGGGAAGG | 9811 |
| hs132666689 | AAAACAGACCAGGTGAACTGAGG | 9812 |
| hs132666451 | AAGCATGACTCTCCAAACTGTGG | 9813 |
| hs132666923 | ACTGACATTACAGGTACCCGAGG | 9814 |
| hs132666444 | GTGTACCTCAAAATGGCTGAAGG | 9815 |
| hs132666786 | AGATGGAGGAAGATTGTGGTGGG | 9816 |
| hs132666092 | CATGCCAGCCTAGTACCTTGAGG | 9817 |
| hs132666499 | TATTACAACATAGCAAGGCGAGG | 9818 |
| hs132666352 | TATCTTCCCCCCTTCCACAGAGG | 9819 |
| hs132666277 | AGAACACAGTGCCCATCAGGAGG | 9820 |
| hs132666147 | ATTTTACTAGGGCAGTGGTGAGG | 9821 |
| hs132666510 | CTTCCCAGTCTATGAAACCAAGG | 9822 |
| hs132666191 | GGCACTCAGGGAGAGTACATGGG | 9823 |
| hs132666542 | AAAGTGACAATTCATTGCAGGGG | 9824 |
| hs132666715 | AGTGATATTATTGTACACGTAGG | 9825 |
| hs132666570 | GATGATGACTTGGACCCTGTGGG | 9826 |
| hs132666296 | GAAATACGTTAACCATTGCAGGG | 9827 |
| hs132666826 | ATTGATAATTGTCTACAGGGTGG | 9828 |
| hs132666833 | CTGAGGTAGCTACAAAACCTGGG | 9829 |
| hs132666343 | TGTAAGTGTGTCTCCCTCTGTGG | 9830 |
| hs132666845 | TTTCAGGAAAGAGTGGCTAGTGG | 9831 |
| hs132666648 | TCATAAGGAAAGAGAATCAGGGG | 9832 |
| hs132666500 | GCAAGGCGAGGAATTTCCGAAGG | 9833 |
| hs132666573 | AGTCATCATCCAATGCATGGTGG | 9834 |
| hs132666183 | ATTGCTGGCATAAAGAGATGAGG | 9835 |
| hs132666750 | GAATGCCATAGGAAGCACTTGGG | 9836 |
| hs132666804 | GCCAGGCTCGAATCAATGAGAGG | 9837 |
| hs132666492 | TCATTGACTCTAGTGTCCCATGG | 9838 |
| hs132666694 | TGTCCTCAAGGATAATGTAGAGG | 9839 |
| hs132666024 | AGAGATCTTTGGAGCCACCAGGG | 9840 |
| hs132666211 | CATCTCAGCAAAGATATCTGAGG | 9841 |
| hs132666177 | ATCTCTTTATGCCAGCAATGAGG | 9842 |
| hs132666407 | TGACATTTTAGAATTTGTGGGGG | 9843 |
| hs132666888 | ATTAGAATTTGTGTATACCAGGG | 9844 |
| hs132666693 | ATGCCTCTACATTATCCTTGAGG | 9845 |
| hs132666065 | AGAGACTTAGAGCCCAACTTGGG | 9846 |
| hs132666179 | AAAGAGATGAGGCTATCCACTGG | 9847 |
| hs132666080 | TCTCATATTTATGAGTCAGAGGG | 9848 |
| hs132666795 | TTTGCATTTGATGAACATTGAGG | 9849 |
| hs132666626 | AAAGAATCAGGAGTCCGTAAGGG | 9850 |
| hs132666603 | AAGAGACAGGTTTCTGACCAGGG | 9851 |
| hs132666905 | GTTCTCGTAAACTACCAGGATGG | 9852 |
| hs132666084 | AGATAGTCTAAATCAAATGAGGG | 9853 |
| hs132666087 | TGAAACTCAAACGTGCCTCAAGG | 9854 |
| hs132666540 | TATGCGAACAAAACTTACATGGG | 9855 |
| hs132666685 | ATTCTGTCTGCTTACCCTGGAGG | 9856 |
| hs132666569 | GGATGATGACTTGGACCCTGTGG | 9857 |
| hs132666806 | GATCTGTGTGATACTCCCATAGG | 9858 |
| hs132666113 | AACTGGGGCTCAGCTCACACTGG | 9859 |
| hs132666730 | ATTATTAAAGATCATCAGGATGG | 9860 |
| hs132666434 | AATAAATGTGGGTCACTAGAGGG | 9861 |
| hs132666173 | CCCAGAACTCTAAGAGATGGTGG | 9862 |
| hs132666582 | GTTTAAATAACTTCCAACCCGGG | 9863 |
| hs132666248 | TTGTAAAGTCCCATCATACAGGG | 9864 |
| hs132666050 | TTACTGACATTCAGTGACATGGG | 9865 |
| hs132666611 | GGAAACTCAACTTTCTCCTGGGG | 9866 |
| hs132666575 | AGTTTAAATTGCCTCCCACAGGG | 9867 |
| hs132666029 | CTACTGATAAATTTAAAGAGCGG | 9868 |
| hs132666719 | TAGATAGTTAAGAAACTATGTGG | 9869 |
| hs132666904 | TCATGTTCTCGTAAACTACCAGG | 9870 |
| hs132666174 | ACTCCCAGAACTCTAAGAGATGG | 9871 |
| hs132666160 | TTGATTTCATGGGAAACAGGTGG | 9872 |
| hs132666698 | TTTATGAACGCTTTACTTGGGGG | 9873 |
| hs132666788 | ATGAAGATGGAGGAAGATTGTGG | 9874 |
| hs132666281 | AAATGTGTAAACTTTGAGAGTGG | 9875 |
| hs132666491 | AGATAATCAAGTGTTGCCATGGG | 9876 |
| hs132666219 | ACTTTGCACTAAGTGAGCCTGGG | 9877 |
| hs132666649 | TTATGACAGCCCCCATAAAGGGG | 9878 |
| hs132666276 | TGTCAGAAGAGCCTCCTGATGGG | 9879 |
| hs132666536 | TTACTTCATACTTCTGCTGGAGG | 9880 |
| hs132666574 | CCAAGTCATCATCCAATGCATGG | 9881 |
| hs132666027 | AATGAATAATTTATCCCTGGTGG | 9882 |
| hs132666483 | ATATAATGTGGTTAAGACCATGG | 9883 |
| hs132666898 | TTAGGTATTATGTAAATCAGTGG | 9884 |
| hs132666831 | GACATTTTACTATACAGCCCAGG | 9885 |
| hs132666485 | AAGACTTTTGGAGCTCACCATGG | 9886 |
| hs132666586 | ACTAGATCCTTTTGGAACCCGGG | 9887 |
| hs132666249 | TTTACAAGTTTTAATTTCAGGGG | 9888 |
| hs132666130 | AGGGAGGCCTGGACACCAGTTGG | 9889 |
| hs132666682 | CTGCATCCTAACTACATAGGAGG | 9890 |
| hs132666797 | GCAGTTGCTGGATGCACAAGCGG | 9891 |
| hs132666505 | AGAAAGTGAGAAATGGCATAGGG | 9892 |
| hs132666652 | TGAATTCTAGAGAATGCTATGGG | 9893 |
| hs132666220 | TCGTTCGTAATTAAATACCCAGG | 9894 |
| hs132666768 | ACATGAAATGACGGAAATGATGG | 9895 |
| hs132666412 | CCAAGGAGTGTGAAAACACGTGG | 9896 |
| hs132666168 | GGACAAAAAGAGTTTTAGCAAGG | 9897 |
| hs132666328 | CATGTGGAAACAAGCAGAGAGGG | 9898 |
| hs132666827 | TTAATTGATAATTGTCTACAGGG | 9899 |
| hs132666836 | AGCTACAGTGTACCTCAGACAGG | 9900 |
| hs132666506 | GAGAAAGTGAGAAATGGCATAGG | 9901 |
| hs132666122 | GTGGAGATAACCAATATACTTGG | 9902 |
| hs132666912 | AGACATTTAATGCAAAACTAGGG | 9903 |
| hs132666841 | GCCTAAATGAGAAGTCCCATTGG | 9904 |
| hs132666523 | TCTCTCTCAAAAATATGCAATGG | 9905 |
| hs132666395 | ACTGCAATCAACGATTCTATGGG | 9906 |
| hs132666370 | ATAGGCTTTTTATTATAACTGGG | 9907 |
| hs132666301 | AGAGCCCTGGGACCCTGCAATGG | 9908 |
| hs132666216 | AATGCCATCTGCAAAGCACTGGG | 9909 |
| hs132666462 | GCTATTACAGATAACATACAAGG | 9910 |
| hs132666812 | ACAAGTCAGGTAAAGAGTCGTGG | 9911 |
| hs132666512 | GGTTTCATAGACTGGGAAGGGGG | 9912 |
| hs132666128 | GTCTGTGAAGATTTTAAGGGAGG | 9913 |
| hs132666111 | AATGGTTTAGACACAGAACTGGG | 9914 |
| hs132666633 | ATATCAACACGAAAGAAGACAGG | 9915 |
| hs132666055 | TATAATTCACTGGTTTGGGTAGG | 9916 |
| hs132666043 | ACCGTCAAGTTTCTGACCCATGG | 9917 |
| hs132666198 | CTGAACCTAAAACTAAGCGTTGG | 9918 |
| hs132666401 | ATTTAATACCAAATTAAGGTAGG | 9919 |
| hs132666062 | GCTTGCAGATAGAGAGACACAGG | 9920 |
| hs132666849 | GTTTGGAGAATGGATTGTGTTGG | 9921 |
| hs132666262 | ATATTTGGTATATATGCCCCAGG | 9922 |
| hs132666035 | CCGTTGAAGTAATTAAGCATAGG | 9923 |
| hs132666846 | TTTTTGTTTTCAGGAAAGAGTGG | 9924 |
| hs132666273 | TTTTAAACATTTATATACACAGG | 9925 |
| hs132666275 | ATGTCAGAAGAGCCTCCTGATGG | 9926 |
| hs132666214 | CATGAAGACATTTAAATCAGAGG | 9927 |
| hs132666819 | ATATTCAGTGAAATATTAGTGGG | 9928 |
| hs132666600 | AGAGATATAAAAATGATGCCAGG | 9929 |
| hs132666748 | AGAATAATACTGAATGCCATAGG | 9930 |
| hs132666439 | AATTGAAGACAAGCTCTGAAAGG | 9931 |
| hs132666227 | TTATGTGAGTTGTTAAAGTGGGG | 9932 |
| hs132666175 | TCTCTCCAATATTCTGCCAGTGG | 9933 |
| hs132666372 | TCAGTGGTTTACACAGCACCTGG | 9934 |
| hs132666398 | AAAATATTTTGACGTCTGGTAGG | 9935 |
| hs132666119 | ATATACTTGGCAGAGCCTCTAGG | 9936 |
| hs132666178 | CTTTATGCCAGCAATGAGGATGG | 9937 |
| hs132666097 | TTTCTGCAGTGAATTGGAGGTGG | 9938 |
| hs132666046 | AACTTGAAATTAAGAGACTAGGG | 9939 |
| hs132666875 | TTAGCCAAGCTGACACAACCAGG | 9940 |
| hs132666548 | GACTGGATAATTAAAGAGTAGGG | 9941 |
| hs132666890 | ATATGCTGCTTAAAAACATACGG | 9942 |
| hs132666298 | TTAACCATTGCAGGGTCCCAGGG | 9943 |
| hs132666225 | TTCAATGCCATATTCAACGTTGG | 9944 |
| hs132666094 | GTTGGAGAAAGATTTCTACTAGG | 9945 |
| hs132666210 | GATATCTTTGCTGAGATGCATGG | 9946 |
| hs132666236 | GGAAAGTAAGTTAAGCACTAAGG | 9947 |
| hs132666232 | GGACTGATTCCAAAGGTGTAGGG | 9948 |
| hs132666546 | TTAAAGAGTAGGGAAGCATTGGG | 9949 |
| hs132666348 | TGTCTCCCTCTGTGGAAGGGGGG | 9950 |
| hs132666840 | CCTAAATGAGAAGTCCCATTGGG | 9951 |
| hs132666044 | GATTGAGTTGTTATTTATCGAGG | 9952 |
| hs132666794 | AGTAGGTATGGTTAATTGGAAGG | 9953 |
| hs132666327 | GAGGGACAAGTTTTCCCAGAAGG | 9954 |
| hs132666894 | TTACAATAACTGGAATGAAAGGG | 9955 |
| hs132666300 | CAATGGTTAACGTATTTCACAGG | 9956 |
| hs132666322 | GAAAGGGGAAGAGTAGAGAGAGG | 9957 |
| hs132666709 | AATAGATCTAGTTTTACCCTAGG | 9958 |
| hs132666860 | CTGTTTGGAGAACTGTTGGAGGG | 9959 |
| hs132666623 | TGTAGAGTATGAGAGGGTAAAGG | 9960 |
| hs132666734 | GAACAATTCCAGGAAGAGCTAGG | 9961 |
| hs132666417 | AACTGCATGACCCAGAGGATGGG | 9962 |
| hs132666042 | ACCATGGGTCAGAAACTTGACGG | 9963 |
| hs132666030 | CCTATGCTTAATTACTTCAACGG | 9964 |
| hs132666585 | GATCCTTTTGGAACCCGGGTTGG | 9965 |
| hs132666230 | ATACATAAGTTCATTAGCAATGG | 9966 |
| hs132666760 | AGTAAATCAATTAGAAAGGAGGG | 9967 |
| hs132666351 | ATCTTCCCCCCTTCCACAGAGGG | 9968 |
| hs132666364 | CAAAACCTCTTTAATTAGAGAGG | 9969 |
| hs132666625 | GAAAGAATCAGGAGTCCGTAAGG | 9970 |
| hs132666167 | AGGAAATCAGAGATGTTTGAAGG | 9971 |
| hs132666085 | GAGATAGTCTAAATCAAATGAGG | 9972 |
| hs132666511 | TCTATGAAACCAAGGTAAGATGG | 9973 |
| hs132666541 | GTATGCGAACAAAACTTACATGG | 9974 |
| hs132666929 | GCTTTTATCTGCAAATGAAGTGG | 9975 |
| hs132666604 | ATTCTTAGTAAAGTCTTCCCTGG | 9976 |
| hs132666337 | ATTACAGAATATTATTAAAGGGG | 9977 |
| hs132666068 | GGATTTTATTCCATTGGAGGAGG | 9978 |
| hs132666017 | TTAATACTAATAGAGGTGTCAGG | 9979 |
| hs132666837 | ATCTTTCTGTATGTGCCCAATGG | 9980 |
| hs132666064 | GTTGGGCTCTAAGTCTCTACAGG | 9981 |
| hs132666438 | ATTGAAGACAAGCTCTGAAAGGG | 9982 |
| hs132666245 | CCATAAATAATAACAAATTGAGG | 9983 |
| hs132666507 | ACACGTGAGAAAGTGAGAAATGG | 9984 |
| hs132666235 | AGCACTAAGGAATATATTAGTGG | 9985 |
| hs132666189 | GTACTCTCCCTGAGTGCCAATGG | 9986 |
| hs132666120 | TGGTTATCTCCACACAAAGAAGG | 9987 |
| hs132666579 | AGAGAAGTCAACATGCTTGTGGG | 9988 |
| hs132666423 | GCACAGAAGTGTGTTTCAAAGGG | 9989 |
| hs132666803 | GGAGTCAGTCACTTAGAGCCAGG | 9990 |
| hs132666140 | CCTTTTATACAAAGATCGTATGG | 9991 |
| hs132666686 | TTCTGTCTGCTTACCCTGGAGGG | 9992 |
| hs132666154 | TGAAAGGGAAGAACTCCAACAGG | 9993 |
| hs132666791 | TATGTGTGCAATGTATAAGTAGG | 9994 |
| hs132666034 | CGTTGAAGTAATTAAGCATAGGG | 9995 |
| hs132666449 | CTGTGGACATATTTTCTCAAGGG | 9996 |
| hs132666514 | TTGGTTTCATAGACTGGGAAGGG | 9997 |
| hs132666702 | TAGCAACCAGGCAGAATGAATGG | 9998 |
| hs132666583 | CTTCCAACCCGGGTTCCAAAAGG | 9999 |
| hs132666315 | ATTAAAATGTCTTCTCACTTCGG | 10000 |
| hs132666132 | TATCAGAACTACGTGCCAACTGG | 10001 |
| hs132666023 | AAGAGATCTTTGGAGCCACCAGG | 10002 |
| hs132666238 | GGATAGAGTCTGATAACATTCGG | 10003 |
| hs132666868 | TGATGGAGTGAAAAGCATAATGG | 10004 |
| hs132666493 | AGTGCAGCTTCCATAGACTTTGG | 10005 |
| hs132666576 | AAGTTTAAATTGCCTCCCACAGG | 10006 |
| hs132666621 | AGAAGGGAGTGAAGCTGGAGAGG | 10007 |
| hs132666610 | TGGAAACTCAACTTTCTCCTGGG | 10008 |
| hs132666435 | TTTATTTATCATAAGGACATAGG | 10009 |
| hs132666538 | CCAGCAGAAGTATGAAGTAAAGG | 10010 |
| hs132666411 | AGGAATTAGTTATAAAGCCAAGG | 10011 |
| hs132666628 | GAACTATCTGTATTCCCTTACGG | 10012 |
| hs132666345 | GTGTGTCTCCCTCTGTGGAAGGG | 10013 |
| hs132666558 | TCTTCATGACAGTTTATGCTGGG | 10014 |
| hs132666477 | GGAAATTAAGGGAAATTCCAAGG | 10015 |
| hs132666090 | TGAGGCACGTTTGAGTTTCAGGG | 10016 |
| hs132666814 | AAAGAGTCGTGGGTGACAACTGG | 10017 |
| hs132666047 | CTAGTCTCTTAATTTCAAGTTGG | 10018 |
| hs132666848 | ACACAATCCATTCTCCAAACAGG | 10019 |
| hs132666725 | GTAAATAAGGATACCCTAATGGG | 10020 |
| hs132666614 | AGTTTCCAATTATTAATTCAGGG | 10021 |
| hs132666897 | CAGTGGATATATTAAAATGATGG | 10022 |
| hs132666671 | ATTAGGTCCTTCAAATAACTTGG | 10023 |
| hs132666363 | ACTTACCTCTCTAATTAAAGAGG | 10024 |
| hs132666326 | CCTCTCTGCTTGTTTCCACATGG | 10025 |
| hs132666096 | CTGCAGTGAATTGGAGGTGGTGG | 10026 |
| hs132666815 | TGGTAGTGTGTCACAGAAGCTGG | 10027 |
| hs132666747 | GAAGGTAGACATAAAATTAGTGG | 10028 |
| hs132666589 | AAGTACACGTCAGATTGAAATGG | 10029 |
| hs132666690 | TGGTCTGTTTTTTCCCTCCAGGG | 10030 |
| hs132666822 | GCTTCAGATGATACAAAAACGGG | 10031 |
| hs132666883 | ATAATTCCAAAGTAAATCACTGG | 10032 |
| hs132666390 | ATCATTCAATTTGTATGCAAGGG | 10033 |
| hs132666522 | TTTTGATCTCACTTGAGAGTTGG | 10034 |
| hs132666067 | TATTCTTGTTCCTCCTCCAATGG | 10035 |
| hs132666019 | GCTGCTATTAATACTAATAGAGG | 10036 |
| hs132666737 | ATAGGCTTCCTTTGTTTTGACGG | 10037 |
| hs132666103 | TTGTATGTTTCCTTTTAAAACGG | 10038 |
| hs132666079 | CTGACTCATAAATATGAGATAGG | 10039 |
| hs132666153 | TTTGGACTCTTCTCACCTGTTGG | 10040 |
| hs132666508 | GATAAAGTAAAAGCCACAATTGG | 10041 |
| hs132666488 | TTTTCAGCATCAAAAATAAGTGG | 10042 |
| hs132666231 | ATAATGTGTCCCTACACCTTTGG | 10043 |
| hs132666141 | CATACGATCTTTGTATAAAAGGG | 10044 |
| hs132666641 | TTAACCTGCCCAGGAATAGATGG | 10045 |
| hs132666865 | TGTTTATAGACAACGCTTAGTGG | 10046 |
| hs132666673 | ACTAAAATCTGAAAGTTGTATGG | 10047 |
| hs132666389 | AACATACTAAGTATATAATTCGG | 10048 |
| hs132666879 | AAAGGCCCAGTGATTTACTTTGG | 10049 |
| hs132666013 | TATTTTTTGCTGTCTTAGGTTGG | 10050 |
| hs132666292 | CTTTCAGGTTTCTAAGGATGAGG | 10051 |
| hs132666810 | TCCTTCTGCCTTATTCCTATGGG | 10052 |
| hs132666830 | ACTGAACGAAGATAGCAAAAAGG | 10053 |
| hs132666642 | TCTATTCCTGGGCAGGTTAAGGG | 10054 |
| hs132666241 | GCTAAAGGAGATTTTAAGCTAGG | 10055 |
| hs132666243 | AAGATATACTTGAAGAATAGAGG | 10056 |
| hs132666161 | GCTTGAATTGTGTAAGAATTGGG | 10057 |
| hs132666552 | GAGAGGCATGGAAGACTTATGGG | 10058 |
| hs132666018 | GCAGCACTATTTTCCCTGTTAGG | 10059 |
| hs132666118 | AGAGGCTCTGCCAAGTATATTGG | 10060 |
| hs132666529 | GCATGTAGACTTAAACCTTCTGG | 10061 |
| hs132666127 | TCTGTCTGTGAAGATTTTAAGGG | 10062 |
| hs132666467 | TACACAGTACAGTAATTTAGTGG | 10063 |
| hs132666266 | ATTTTTATGGGAAATTCAACTGG | 10064 |
| hs132666706 | TCATGTAGCAGTTATTTTAAGGG | 10065 |
| hs132666447 | GAGAAAATATGTCCACAGTTTGG | 10066 |
| hs132666402 | TTAATCATTTCAAAATTCATTGG | 10067 |
| hs132666807 | GTGATACTCCCATAGGAATAAGG | 10068 |
| hs132666478 | TGAGGATTTTAGGAAATTAAGGG | 10069 |
| hs132666414 | CCACGTGTTTTCACACTCCTTGG | 10070 |
| hs132666650 | CTTATGACAGCCCCCATAAAGGG | 10071 |
| hs132666307 | TTAAAATGTTCATTAAGAATTGG | 10072 |
| hs132666906 | GGATGGATCCCATCTATTATAGG | 10073 |
| hs132666742 | ACGAATGTAATGTAATTTACTGG | 10074 |
| hs132666909 | AGAAGTACACCTATAATAGATGG | 10075 |
| hs132666726 | TATTTACCCAAAACAATTAAGGG | 10076 |
| hs132666470 | TTGTATACTTTGTACCCTAATGG | 10077 |
| hs132666724 | GGTAAATAAGGATACCCTAATGG | 10078 |
| hs132666736 | ACATAAAGAAGTGTAATAATAGG | 10079 |
| hs132666680 | ATTTATCCTCCTATGTAGTTAGG | 10080 |
| hs132666336 | AATTACAGAATATTATTAAAGGG | 10081 |
| hs132666163 | TATTTTATGTTGCTTCCATTTGG | 10082 |
| hs132666086 | GATTGCTCACTTCTACTTAGAGG | 10083 |
| hs132666176 | GCTATCCACTGGCAGAATATTGG | 10084 |
| hs132666379 | TTTGAGACCATGCAAATATAAGG | 10085 |
| hs132666524 | TGAGAGAGAGAAATATGATATGG | 10086 |
| hs132666445 | CTTTTGTGTGTACCTCAAAATGG | 10087 |
| hs132666052 | CCTTAAATACTCTCCTACTATGG | 10088 |
| hs132666665 | GTAATGACACTTTTGCCTATTGG | 10089 |
| hs132666799 | GATATAAAGCTTTAATTTGAGGG | 10090 |
| hs132666039 | CCTTAAATTGGGTACTTAAAGGG | 10091 |
| hs132666359 | TATCTTTCTGGTATTTTCTTGGG | 10092 |
| hs132666032 | TTACTTCAACGGATATTCTATGG | 10093 |
| hs132666440 | TTATCTGCATAACGAAAATATGG | 10094 |
| hs132666720 | CATAGTTTCTTAACTATCTAAGG | 10095 |
| hs132666105 | AGACATTTGACCGTTTTAAAAGG | 10096 |
| hs132666722 | TTAAATCCCTTAATTGTTTTGGG | 10097 |
| hs132666608 | ACCATCCCTGAATTAATAATTGG | 10098 |
| hs132666728 | GATACCCTAATGGGTAAAATTGG | 10099 |
| hs132666501 | GCTATGTTGTAATAAGTTAAAGG | 10100 |
| hs132666212 | AATGTCTTCATGCTTTAAATTGG | 10101 |
| hs132666853 | GCTCTGTTAATTTCTGTATTAGG | 10102 |
| hs132666106 | ATTCTCGTCTCTGTTCTTTATGG | 10103 |
| hs132666400 | ATAATCTTCCTACCTTAATTTGG | 10104 |
| hs132665858 | AGCCTGCCGAGTGAGAGTGTGGG | 10105 |
| hs132665800 | TACAGCTGAATGGAACCAGGTGG | 10106 |
| hs132665870 | ACTGGCTTGATGATTTCCAGCGG | 10107 |
| hs132665656 | TTAGAATAACTGGAACAATGTGG | 10108 |
| hs132665886 | GAAAATCTGGAGCTTCTGTGAGG | 10109 |
| hs132665669 | AGGGCCAACAAGATATCACAAGG | 10110 |
| hs132665649 | GTTATCTTCTCCTATCAGAGGGG | 10111 |
| hs132665639 | TAAATATCAAGAAAGACAGGAGG | 10112 |
| hs132665801 | TGACTATGTATTAAGCCACCTGG | 10113 |
| hs132665592 | AATACTGGAGTACAGATGGGAGG | 10114 |
| hs132665760 | GAAGCAAAGAATACAACACAGGG | 10115 |
| hs132665564 | ATTACTAATAAGTATATAGGCGG | 10116 |
| hs132665740 | TGAACATGGCAATTTCGAGGAGG | 10117 |
| hs132665715 | TACTTTGCAAGATAGACCTGTGG | 10118 |
| hs132665863 | TAGAAGAAAATATAGACTCGAGG | 10119 |
| hs132665981 | AAAATTATACCATCTCAGAAGGG | 10120 |
| hs132665914 | GCTCGTGTCATGAACTTGAGTGG | 10121 |
| hs132665651 | AGTAGAATGAGAACACTATGTGG | 10122 |
| hs132666006 | GAATCACAGATAACAAAGCACGG | 10123 |
| hs132665889 | AATCCCCTTGTGATCAAAGGAGG | 10124 |
| hs132665696 | TTTGAGGACGAACGTATGGGTGG | 10125 |
| hs132665892 | ATAGCCTCCTTTGATCACAAGGG | 10126 |
| hs132665881 | CCATAACGACTTGATAGGGAGGG | 10127 |
| hs132665939 | GATTTGCATTTTATCAATAGCGG | 10128 |
| hs132665987 | CCTTTCTCAGTATTTACATGTGG | 10129 |
| hs132665764 | AGAGGTGCTAATAAAGAAGGAGG | 10130 |
| hs132665849 | CAGTCATTCTAAAGTAGTGGGGG | 10131 |
| hs132665992 | ATATCTTATAATATATGACAGGG | 10132 |
| hs132665668 | ATTTAACTATTAATTCAGCAGGG | 10133 |
| hs132665897 | TGATACTAAAAGAATGTGAGAGG | 10134 |
| hs132665624 | GGAACGTGCACAATCATGGATGG | 10135 |
| hs132665925 | ATACATTGTATTTAGCCTGAGGG | 10136 |
| hs132665824 | GAAAATATACTTAGGATGCACGG | 10137 |
| hs132665876 | GGTAATCAAGTGCAGATCCGAGG | 10138 |
| hs132665799 | ATATACAGCTGAATGGAACCAGG | 10139 |
| hs132665652 | TTATGATGATAACATTTAGAGGG | 10140 |
| hs132665794 | AAAGCTAATGATAAAGACCTGGG | 10141 |
| hs132665968 | ATTTAGATGTGATCTTCCCATGG | 10142 |
| hs132665709 | GTGACTGTGTATCAACAAAGAGG | 10143 |
| hs132665915 | AATAACCTATATAAACCGACAGG | 10144 |
| hs132665810 | GGAAGAGGCTATCCTTCACCTGG | 10145 |
| hs132665839 | GCCAGAAGTCATTAACTGCAAGG | 10146 |
| hs132665591 | TAAAATACTGGAGTACAGATGGG | 10147 |
| hs132665997 | GTAACTGAACAATATATGAAAGG | 10148 |
| hs132665612 | GGTGCTTTGAAATTTTCAAGTGG | 10149 |
| hs132665891 | TAGCCTCCTTTGATCACAAGGGG | 10150 |
| hs132665803 | GATGAGCCTCAACCAGGTGAAGG | 10151 |
| hs132665853 | AGTCATAGTGCTGTTTTCGAGGG | 10152 |
| hs132665808 | GCCTCTTCCACTAAGGCAGGTGG | 10153 |
| hs132665733 | GAGTATTCAGATGATACCCTTGG | 10154 |
| hs132665711 | ATACACAGTCACTTAAAATGAGG | 10155 |
| hs132665879 | ATGACCATAACGACTTGATAGGG | 10156 |
| hs132665661 | ACATGCTCTGCTGTTGCTAGGGG | 10157 |
| hs132665697 | TCATTTGAGGACGAACGTATGGG | 10158 |
| hs132665617 | GCTAATTGGAAAGGGATCCTGGG | 10159 |
| hs132665941 | TAAAAGTTCCTGTTATCATGTGG | 10160 |
| hs132665934 | GAGAGTTCAGGTTGATAAAGGGG | 10161 |
| hs132665820 | AATTATTTCAAGCTTTTGTGGGG | 10162 |
| hs132665610 | ATTTTACATGGTGCTCTGAAGGG | 10163 |
| hs132665572 | TCAAAGTACTCCTATTTCCAAGG | 10164 |
| hs132665831 | TGATAGCAGGAGAGCCCACAGGG | 10165 |
| hs132665899 | ATTTAAAAGCTGACTTCTGGGGG | 10166 |
| hs132665851 | AGTAGTGGGGGTACAAAAGAGGG | 10167 |
| hs132665744 | GAGAAAGATAATATTGTCAAGGG | 10168 |
| hs132665871 | CTGGCTTGATGATTTCCAGCGGG | 10169 |
| hs132665679 | ATAGTTTTTATAGTAAAATGGGG | 10170 |
| hs132665908 | ACTGGCTAAAAGCATTTGAAAGG | 10171 |
| hs132665920 | TTTCTTACTACATCACCTGTCGG | 10172 |
| hs132665994 | ATATAATAGATACCATACTTAGG | 10173 |
| hs132665862 | TGCTTTCCCACACTCTCACTCGG | 10174 |
| hs132665750 | ATAATTTAGAATCCGAGTAGTGG | 10175 |
| hs132665607 | TGAAAGATACACATTTTACATGG | 10176 |
| hs132665749 | CATGTTTAGAAGCCACTACTCGG | 10177 |
| hs132665846 | AGTCAGTCATTCTAAAGTAGTGG | 10178 |
| hs132665995 | ACAATTGTGCAAGCTTGCTAAGG | 10179 |
| hs132665710 | GTATCAACAAAGAGGAACATAGG | 10180 |
| hs132665965 | TCGTATTTGTAAAAATACAATGG | 10181 |
| hs132665692 | TGAAAATCGCCATTTCTCCTGGG | 10182 |
| hs132665834 | TAGTTATTTCAGCATCCCTGTGG | 10183 |
| hs132665647 | GAGTTATCTTCTCCTATCAGAGG | 10184 |
| hs132665797 | AATCTGGATATACAGCTGAATGG | 10185 |
| hs132665762 | GAGGAACAGAGGTCTGAAAGAGG | 10186 |
| hs132665833 | AGTTATTTCAGCATCCCTGTGGG | 10187 |
| hs132665700 | ATGAACTTCTGTTTTCAGGTAGG | 10188 |
| hs132665887 | TCAAATCCCCTTGTGATCAAAGG | 10189 |
| hs132665825 | GAAAGCTTATGAAGAACTGCTGG | 10190 |
| hs132665726 | TTCCCATGTTTTCAAGACCAAGG | 10191 |
| hs132665636 | TTTCTCCTCTAAGATGCTCAGGG | 10192 |
| hs132665874 | AAAAAGTTGATTCTGAAAGAGGG | 10193 |
| hs132665802 | CCCAGAGATGAGCCTCAACCAGG | 10194 |
| hs132665769 | GTTAGAGAAGATACAGAAAGAGG | 10195 |
| hs132665927 | TTTACCTTGATGTTTCCCTCAGG | 10196 |
| hs132665704 | TTCTGTGAGTTAATGGGAGACGG | 10197 |
| hs132665648 | AGTTATCTTCTCCTATCAGAGGG | 10198 |
| hs132665943 | TAAGACAGCTTTGATCAGGCAGG | 10199 |
| hs132665727 | TCCCATGTTTTCAAGACCAAGGG | 10200 |
| hs132665686 | GAGCACATATTTCAGTTTGTCGG | 10201 |
| hs132665969 | TGAAAAGTAATTTTATCCATGGG | 10202 |
| hs132665984 | CCACATGTAAATACTGAGAAAGG | 10203 |
| hs132665741 | TTATGAACATGGCAATTTCGAGG | 10204 |
| hs132665807 | ATAGCCTCTTCCACTAAGGCAGG | 10205 |
| hs132665844 | GGAATTGTCTCTGTTAGGTGAGG | 10206 |
| hs132665979 | ATAAAACTTCCTATTTGTGAAGG | 10207 |
| hs132665867 | GTGTTTACTACCCAGAGTATAGG | 10208 |
| hs132665945 | ATTATTGATCTGATTCTCACAGG | 10209 |
| hs132665955 | TTTTTAGGCTGCTTGAAAAAGGG | 10210 |
| hs132665590 | GTAAAATACTGGAGTACAGATGG | 10211 |
| hs132665772 | TAAGTTACTCTTCAGTCAAAGGG | 10212 |
| hs132665845 | GAATTGTCTCTGTTAGGTGAGGG | 10213 |
| hs132665916 | GGTTATTTTAAACTCATGGCAGG | 10214 |
| hs132665938 | ATTTGCATTTTATCAATAGCGGG | 10215 |
| hs132665662 | TGTTGCTAGGGGTATTTCAATGG | 10216 |
| hs132665586 | AAGACTTCATTTACATCCACAGG | 10217 |
| hs132665875 | AACTTTTTACCAACTCCCGCTGG | 10218 |
| hs132665688 | TGATGAGAGTACCTTGTTCGTGG | 10219 |
| hs132665608 | GTATCTTTCAGCTAAGAGATAGG | 10220 |
| hs132665766 | AGAAAGAGGAGGCTTTTAAGAGG | 10221 |
| hs132665972 | ACAGGCAGAGTAAATAAAATGGG | 10222 |
| hs132665619 | TTTTACCTGCTAATTGGAAAGGG | 10223 |
| hs132666003 | GATTCTTCTGTGACTGACTAGGG | 10224 |
| hs132665558 | TGACAGAGTGAAACATCTTAAGG | 10225 |
| hs132665743 | GATAATATTGTCAAGGGCAGAGG | 10226 |
| hs132665780 | TTGGTTTGTGTGTTAGGCATGGG | 10227 |
| hs132665616 | AGGATCCCTTTCCAATTAGCAGG | 10228 |
| hs132665729 | GGTCTTGAAAACATGGGAAAGGG | 10229 |
| hs132665722 | GCACTTTAAGAGAGCATTGTGGG | 10230 |
| hs132665948 | TTGTTTGCTGTGATTTTTGAGGG | 10231 |
| hs132665898 | ATATTCTAGGACACAATCTTGGG | 10232 |
| hs132665991 | AATATCTTATAATATATGACAGG | 10233 |
| hs132665792 | CTAAAAGATGAAAACACAACCGG | 10234 |
| hs132665565 | ATACTTATTAGTAATTTCAATGG | 10235 |
| hs132665765 | TTAAGAGGTGCTAATAAAGAAGG | 10236 |
| hs132665674 | AATGGTCTCTGACAGTCTATAGG | 10237 |
| hs132665878 | TCTGGCTTTGGGCTCTTCCTCGG | 10238 |
| hs132665635 | AAGCACCCTGAGCATCTTAGAGG | 10239 |
| hs132665885 | CCCTCCCTATCAAGTCGTTATGG | 10240 |
| hs132665933 | TGAGAGTTCAGGTTGATAAAGGG | 10241 |
| hs132665576 | GTTCAAAATGTAACTCTTAAGGG | 10242 |
| hs132665940 | ATAGGTAACCACATGATAACAGG | 10243 |
| hs132665905 | ACAAGGAAAAAATTATGCTTAGG | 10244 |
| hs132665937 | ATAAAATGCAAATCGTTCATAGG | 10245 |
| hs132665837 | TATTTTCTCATTGAAGACTTTGG | 10246 |
| hs132665755 | AGAATTATAAATACTAAAATGGG | 10247 |
| hs132665950 | TTTCAAGTATACTTCTTTGAAGG | 10248 |
| hs132665784 | ACTTGAACGTGAAGTGGCTTTGG | 10249 |
| hs132665713 | CTATCTTGCAAAGTAAAAACTGG | 10250 |
| hs132665928 | ATTTCATGTCCCATTTTAGTAGG | 10251 |
| hs132665909 | TTAGCCAGTTAGCATATCATAGG | 10252 |
| hs132665659 | AGACATGCTCTGCTGTTGCTAGG | 10253 |
| hs132665561 | GTTGTAGCAAGTCATGAAAATGG | 10254 |
| hs132665895 | GAGCACATGGTAACGCAAATTGG | 10255 |
| hs132665819 | GTGAATGATGGGGAAAGTTTAGG | 10256 |
| hs132665673 | CATTCCTTGTGATATCTTGTTGG | 10257 |
| hs132665975 | CATGCATCTTTGTATATGATTGG | 10258 |
| hs132665877 | GATGACCATAACGACTTGATAGG | 10259 |
| hs132665854 | GCTGTTTTCGAGGGTAAAATTGG | 10260 |
| hs132665776 | TCTGCAGTTGCATTTAAGATAGG | 10261 |
| hs132665919 | CATCACCTGTCGGTTTATATAGG | 10262 |
| hs132665869 | GAGAAATTGGAAGCATTAACTGG | 10263 |
| hs132665684 | TATGTGCTCATTCTACTTAAAGG | 10264 |
| hs132665868 | ATAACAGAGATAGGAGAAATTGG | 10265 |
| hs132665663 | TCAATGGATATTATTCAAAAAGG | 10266 |
| hs132665912 | TTTTAGGCTTTCATTAAAAATGG | 10267 |
| hs132665911 | TTTTAATGAAAGCCTAAAAATGG | 10268 |
| hs132665634 | ATATAACATTTACCTTTTAATGG | 10269 |
| hs132665568 | TATTTCTGCTAAATTATTTATGG | 10270 |
| hs132665428 | AAGAATGTATGTGTCTTACGTGG | 10271 |
| hs132665421 | ACTTCTGAGGAAACTATACGTGG | 10272 |
| hs132665475 | GCAGATACCAGGGAACACTGGGG | 10273 |
| hs132665275 | CTGTTGTTGTGGGAAATGAGTGG | 10274 |
| hs132665500 | GTGATAATACAGTTTCTAGGGGG | 10275 |
| hs132665195 | AAAACATTTCAAAAAAAACGTGG | 10276 |
| hs132665200 | ATATGCTGCCTGCTCAACAAGGG | 10277 |
| hs132665114 | CATAATGCTACTCAGGATGGCGG | 10278 |
| hs132665473 | AGATACCAGGGAACACTGGGGGG | 10279 |
| hs132665124 | CTAAGTATAAAAGAAGTCCGTGG | 10280 |
| hs132665072 | GGAGTACCTACTATGTACCATGG | 10281 |
| hs132665185 | TCTCTTGTGTGAAAATTAGGGGG | 10282 |
| hs132665484 | AGTCGTTGAGGTAATAACGTTGG | 10283 |
| hs132665207 | ATTCTATTAGATACTGCCAGTGG | 10284 |
| hs132665240 | AATAAATATATTGCACCCAGAGG | 10285 |
| hs132665441 | AGCCCAAAAGTACAGTTGAGTGG | 10286 |
| hs132665248 | TGAAGTACTTGCATGGAAGGTGG | 10287 |
| hs132665144 | GTGAAACGTCAACATGAACCAGG | 10288 |
| hs132665289 | AATCAAACTGCCCAGTACTGAGG | 10289 |
| hs132665084 | AGATCTCTGTAGGTACATGAGGG | 10290 |
| hs132665176 | CATCTATAATAGCAAAAAGGGGG | 10291 |
| hs132665241 | TTATTCACAGACTATTTCAGGGG | 10292 |
| hs132665423 | GAGGAACAGCCATTTACATGAGG | 10293 |
| hs132665288 | GCATTATACTAAGTGTCATGTGG | 10294 |
| hs132665263 | ACCTGTGAAGACAAGTTCTGAGG | 10295 |
| hs132665362 | ACTTAATGAGGGCAAGTGAGAGG | 10296 |
| hs132665143 | AGCAGTTAGAAGTCCATGAAGGG | 10297 |
| hs132665530 | TTATTACAAAACAGGAATGACGG | 10298 |
| hs132665368 | TAAGCTTTGGATCATAACCCTGG | 10299 |
| hs132665121 | ATCTCATTAAAAATATATCAGGG | 10300 |
| hs132665474 | CAGATACCAGGGAACACTGGGGG | 10301 |
| hs132665098 | GTGCAAGTTAGCAAAACCACAGG | 10302 |
| hs132665298 | GCTACTCATTCATGATGAAGGGG | 10303 |
| hs132665127 | TATGTAGCTCCTGTAGGCCACGG | 10304 |
| hs132665479 | GCTAACTTTGGCAGATACCAGGG | 10305 |
| hs132665352 | ACTGATGCCTTTCATGACCAAGG | 10306 |
| hs132665284 | CCAAAAGGAAGAGCCTCTGTGGG | 10307 |
| hs132665166 | TATATTGCAACATTTTTTGGGGG | 10308 |
| hs132665123 | ATGTAAAAAGAATATATACATGG | 10309 |
| hs132665106 | AATAGAACATTAGACTATCAGGG | 10310 |
| hs132665077 | CCATACATAGCATGAAAGCATGG | 10311 |
| hs132665432 | TCCATAGCCTAAGCTTGGGAAGG | 10312 |
| hs132665076 | AAATGACATAGCATATTCCATGG | 10313 |
| hs132665399 | TGAAAGTACAAAATTTACCATGG | 10314 |
| hs132665268 | AAAAGTAATACCCCTAGTGAGGG | 10315 |
| hs132665457 | TTAATGGGGAAACAGAGCTATGG | 10316 |
| hs132665465 | TCTTTACTGGTAGAACAAAAGGG | 10317 |
| hs132665419 | ATGAGTGGTTTATACAAGAGTGG | 10318 |
| hs132665397 | ACCATGGTTACAATGTAGAAGGG | 10319 |
| hs132665129 | TTAGAATATGTAGCTCCTGTAGG | 10320 |
| hs132665053 | AAGCTCTGATGGGAGCTGGAAGG | 10321 |
| hs132665250 | GCAGTTCTGAAGTACTTGCATGG | 10322 |
| hs132665155 | TGTATGGTTGACCTTTCTCAGGG | 10323 |
| hs132665435 | GAATCTTCCTTCCCAAGCTTAGG | 10324 |
| hs132665395 | TCCCTTCTACATTGTAACCATGG | 10325 |
| hs132665066 | AACCCAGAAAACTTTATCAAGGG | 10326 |
| hs132665221 | TTCTCATTTTAATTGAAGAGAGG | 10327 |
| hs132665142 | AAGCAGTTAGAAGTCCATGAAGG | 10328 |
| hs132665311 | AGATTTTGTCAGATGGGTGAGGG | 10329 |
| hs132665051 | AAAGTGCTCAAAGCTCTGATGGG | 10330 |
| hs132665364 | GGAAACTGTTAACTTAATGAGGG | 10331 |
| hs132665074 | ACATAGTAGGTACTCCAGAATGG | 10332 |
| hs132665177 | CTATAATAGCAAAAAGGGGGAGG | 10333 |
| hs132665105 | ACATTAGACTATCAGGGCAGAGG | 10334 |
| hs132665445 | CCCTCTGAAATACACCTGAAGGG | 10335 |
| hs132665401 | TATGCTGAGAAGACAGGATAGGG | 10336 |
| hs132665402 | ATATGCTGAGAAGACAGGATAGG | 10337 |
| hs132665407 | GCTTCATAGACATTTAGAAACGG | 10338 |
| hs132665418 | TAGTGGCATAATAATATGAGTGG | 10339 |
| hs132665203 | CCTATAGGAAATGTCTCCACTGG | 10340 |
| hs132665302 | GTCTGTATACAAATGTGGCATGG | 10341 |
| hs132665332 | CCTTTCACCATAATTTCTAGAGG | 10342 |
| hs132665119 | AAATATATCAGGGAAGAAGGAGG | 10343 |
| hs132665184 | CTCTCTTGTGTGAAAATTAGGGG | 10344 |
| hs132665345 | TGGAGTTTTAGGACAACCTAGGG | 10345 |
| hs132665245 | AGTAATGATCCATTTCCTCTGGG | 10346 |
| hs132665507 | AACCAAATACAGTCAGTCATGGG | 10347 |
| hs132665495 | ATTTCTGATTAATTCAGTGTAGG | 10348 |
| hs132665151 | TCAATCCAGCATCAGTCTATCGG | 10349 |
| hs132665194 | ATCTCACATGATTATAAATGTGG | 10350 |
| hs132665216 | GCTTTAAAATACTTGGGCAGGGG | 10351 |
| hs132665350 | TGAAAGGCCTTGGTCATGAAAGG | 10352 |
| hs132665381 | AAAGAACTGGAACATCCATAAGG | 10353 |
| hs132665313 | GCAACCAGATTTTGTCAGATGGG | 10354 |
| hs132665283 | TCTGTGGGTGTGTGTGAGCACGG | 10355 |
| hs132665104 | CATTAGACTATCAGGGCAGAGGG | 10356 |
| hs132665431 | TATCTCCATAGCCTAAGCTTGGG | 10357 |
| hs132665491 | TGGTAAGTAAAACTACATGCAGG | 10358 |
| hs132665270 | AATTTATATTGCCCTCACTAGGG | 10359 |
| hs132665130 | TTGCTTCCTTAAGCATTAGGAGG | 10360 |
| hs132665394 | ATACTTTGCACCATCAAATGAGG | 10361 |
| hs132665260 | TTTTGCTGAACTTTAAGTGAGGG | 10362 |
| hs132665357 | GTAGCTGTGCATATTGAAAAGGG | 10363 |
| hs132665272 | TTGAAAATAAAAACGCAAAAGGG | 10364 |
| hs132665542 | TAGGGATTTGATAAACACATAGG | 10365 |
| hs132665297 | GGCTACTCATTCATGATGAAGGG | 10366 |
| hs132665370 | AAAATGTCTCTAGTAAAAAGAGG | 10367 |
| hs132665040 | CTTTCAGTCTGTGGGTTCAGGGG | 10368 |
| hs132665159 | AACTACAGTGAAGTACCAATAGG | 10369 |
| hs132665073 | TAGGTACTCCAGAATGGTAATGG | 10370 |
| hs132665161 | GCAGTATCCGTTAAAATCTAGGG | 10371 |
| hs132665412 | TTTAGAATGAAATTCCAAGATGG | 10372 |
| hs132665205 | CCAGTGGAGACATTTCCTATAGG | 10373 |
| hs132665526 | AGACTTCTTTTTTAAATGAGAGG | 10374 |
| hs132665116 | ATATTTTTAATGAGATACAATGG | 10375 |
| hs132665209 | CTTTTGGCTTCAGTGTACATTGG | 10376 |
| hs132665513 | GAATTTATGCCCCAAAATGCAGG | 10377 |
| hs132665463 | GGTCGAACTGATACGTCATTAGG | 10378 |
| hs132665430 | ATATCTCCATAGCCTAAGCTTGG | 10379 |
| hs132665305 | GCTAAAACTCTCATGATCACTGG | 10380 |
| hs132665315 | TGAATTATGTTATTTGAGGTGGG | 10381 |
| hs132665096 | AGAACGTCTCTAGAAACATAAGG | 10382 |
| hs132665082 | GCAACATCACGCTGTGCTATGGG | 10383 |
| hs132665154 | TCACTTTGTGTCCCTGAGAAAGG | 10384 |
| hs132665434 | TCCTTCCCAAGCTTAGGCTATGG | 10385 |
| hs132665525 | AAAAAGTTACTTAAAAGTAAAGG | 10386 |
| hs132665191 | TGACTAATATGGGATATAGAAGG | 10387 |
| hs132665038 | ATTATTTTTTTCTTTCTAGAGGG | 10388 |
| hs132665387 | GCCTGCTTTAAAACTATACATGG | 10389 |
| hs132665110 | TTGTGTTTCAAATGAATTGAGGG | 10390 |
| hs132665256 | TGTTTTGTGTTATTCTACCCTGG | 10391 |
| hs132665278 | GTCTCTTTCTTTCACACACATGG | 10392 |
| hs132665366 | ATCCAAAGCTTACATATTGACGG | 10393 |
| hs132665422 | GGAAACTATACGTGGTTAAGAGG | 10394 |
| hs132665087 | TGTTCTTTTGAGATCTCTGTAGG | 10395 |
| hs132665075 | CATATTCCATGGTACATAGTAGG | 10396 |
| hs132665504 | GAGTGAACAAGTTTAAGAACAGG | 10397 |
| hs132665396 | TAGAAGGGAACCTCATTTGATGG | 10398 |
| hs132665451 | TGTTCCTTGAACGACAAAAACGG | 10399 |
| hs132665145 | ACATGAACCAGGTATTAAACAGG | 10400 |
| hs132665348 | AATAATACACTGAAAGGCCTTGG | 10401 |
| hs132665503 | TTATTTAGATGTATGTTGCTTGG | 10402 |
| hs132665477 | TGGCAGATACCAGGGAACACTGG | 10403 |
| hs132665363 | TTAACAGTTTCCTGAGACCAGGG | 10404 |
| hs132665374 | TTATGTCAGCATTAATTGGTTGG | 10405 |
| hs132665543 | TGATTTAGATAATCTTCTTAGGG | 10406 |
| hs132665467 | ATTAACACAGTCAACCAAACAGG | 10407 |
| hs132665163 | ACGGATACTGCAGAGCCTATTGG | 10408 |
| hs132665164 | AACCTGTCCCTAGATTTTAACGG | 10409 |
| hs132665427 | TTTTCCTTTCTATACAAAAAGGG | 10410 |
| hs132665137 | ATCATAATACTTTTTTCAAACGG | 10411 |
| hs132665536 | TGAGTTCATTGGAAGAAAATGGG | 10412 |
| hs132665292 | CTTATTCCTTCCTCAGTACTGGG | 10413 |
| hs132665056 | ACATTTTTAATTTTAAAAATGGG | 10414 |
| hs132665149 | TTTTTTGCCTGTTTAATACCTGG | 10415 |
| hs132665043 | GATCATTTCTTTCAGTCTGTGGG | 10416 |
| hs132665089 | TAAAAGTTCGAAGAGTAGTTTGG | 10417 |
| hs132665329 | GATACTATAATTATGTAATAGGG | 10418 |
| hs132665342 | ATAAAAACAGACATATGTTTAGG | 10419 |
| hs132665458 | TTAAGTAGTCATCCTAGTTATGG | 10420 |
| hs132665202 | TCTAAACTATAAACTCCTATAGG | 10421 |
| hs132665408 | AGAAACGGACAGAAATCATTTGG | 10422 |
| hs132665095 | GGTAATATAATTTAGTTAAAGGG | 10423 |
| hs132665443 | AAAGGAGCTATTATGATTTAGGG | 10424 |
| hs132665238 | TCTAATGTGCTACAACAAAATGG | 10425 |
| hs132665049 | TCTTATGTCTTATTACTTGATGG | 10426 |
| hs132665385 | ATACATGGACGTTTTCCTTATGG | 10427 |
| hs132665353 | ATAATATTGCTAACTAATAATGG | 10428 |
| hs132665173 | CGACATCTATAATAGCAAAAAGG | 10429 |
| hs132665375 | GTTCTTATGTCAGCATTAATTGG | 10430 |
| hs132665158 | CTATAAGTTGATTTTCAATATGG | 10431 |
| hs132664985 | GGAGTACAGAGGAACCACACCGG | 10432 |
| hs132664986 | AAAATGTAGCTGGAGTACAGAGG | 10433 |
| hs132664984 | GGTTACTACACTATCCGGTGTGG | 10434 |
| hs132664909 | GAACAAATGGAGATCACCAGAGG | 10435 |
| hs132664872 | AAGGAGATACCATACTCTGGAGG | 10436 |
| hs132664830 | ACATCATTTTGATATAAGAGGGG | 10437 |
| hs132664948 | ATAGACATGGAAAGGTGACAAGG | 10438 |
| hs132664960 | TGAGCTATGTGCTTTTCGCGGGG | 10439 |
| hs132664824 | ATGGGTATGAATGCGTACAGTGG | 10440 |
| hs132664974 | AGGAGACAGTCAGATCCTCATGG | 10441 |
| hs132664903 | GGTTGAGGAAGTCATCCTAAGGG | 10442 |
| hs132664973 | TCCTCATGGTAAAAGCAGCATGG | 10443 |
| hs132665001 | CATTTTTTACAGGATACATGTGG | 10444 |
| hs132664900 | GGGTGATAAGGAGGTGACAACGG | 10445 |
| hs132664927 | TATGCATGAATGTACTGTGTAGG | 10446 |
| hs132664995 | ATGGAAATAGTTAGAAACACGGG | 10447 |
| hs132664820 | ACATATTGAACAAAGAGCCAAGG | 10448 |
| hs132664970 | GCCATGCTGCTTTTACCATGAGG | 10449 |
| hs132664895 | GGGTCTGAGAGAAAGAGTAAGGG | 10450 |
| hs132664933 | CCTCTGATTCACAGGAAAAGCGG | 10451 |
| hs132665007 | ACAGCGCTAATTGATTGTGTCGG | 10452 |
| hs132664996 | CATGGAAATAGTTAGAAACACGG | 10453 |
| hs132664836 | TGCCACTTTTTAAATTACGGTGG | 10454 |
| hs132664953 | TTAATACAAAAGGCAAGGAGTGG | 10455 |
| hs132664979 | GATCCTTTCTGGACTAAAAGGGG | 10456 |
| hs132664889 | GCTTAATATTATTCATACAAGGG | 10457 |
| hs132664907 | ATATATTAAATATTGTCTGGAGG | 10458 |
| hs132664958 | ATGAGAAACTGATTAGAGGATGG | 10459 |
| hs132664812 | TCTTATCAGATATTTGTGAAGGG | 10460 |
| hs132665006 | TGTCGGTTTGCGTAAGCATGAGG | 10461 |
| hs132664920 | AAATTTCCTGCTAGGAACAGTGG | 10462 |
| hs132664981 | GGGGTAAGAACTCTGATGCTGGG | 10463 |
| hs132664868 | AGAAAGTTGGTATATATCCATGG | 10464 |
| hs132664935 | CCGCTTTTCCTGTGAATCAGAGG | 10465 |
| hs132664854 | AGTAACTTTTGTATTAGGAGAGG | 10466 |
| hs132664874 | TAAAGAATAAACAGACTCAAAGG | 10467 |
| hs132664837 | AGCCACCGTAATTTAAAAAGTGG | 10468 |
| hs132664808 | CTTTCCATACTCTATGGCACAGG | 10469 |
| hs132664940 | CTTTTGGATAAAGAATACCTTGG | 10470 |
| hs132664994 | ACACGGGTCAACAACAAGCTTGG | 10471 |
| hs132664988 | TCAAATTATCGTAATTTGAGAGG | 10472 |
| hs132664910 | ATCAAGACCAAGATACTAGCAGG | 10473 |
| hs132664888 | GTTCTGCTGAGATTAGTGATAGG | 10474 |
| hs132664886 | TTAGCTCATATTCTAATGATCGG | 10475 |
| hs132664807 | TGGCACAGGATGAAGTCAACCGG | 10476 |
| hs132664867 | TCAAACCAGTGCTAGAAAGTTGG | 10477 |
| hs132664982 | TTACCCCTTTTAGTCCAGAAAGG | 10478 |
| hs132664869 | CTTTCTAGCACTGGTTTGAGAGG | 10479 |
| hs132664972 | CATGGTAAAAGCAGCATGGCCGG | 10480 |
| hs132664991 | AGGAAAATATTTAAAACTGATGG | 10481 |
| hs132664962 | TATGAGCTATGTGCTTTTCGCGG | 10482 |
| hs132664959 | GGGAATGAGAAACTGATTAGAGG | 10483 |
| hs132664870 | ATATACCAACTTTCTAGCACTGG | 10484 |
| hs132664928 | TATATCTGAATCTCAAGAATCGG | 10485 |
| hs132664831 | CACATCATTTTGATATAAGAGGG | 10486 |
| hs132664932 | GGATTATTCCTCTGATTCACAGG | 10487 |
| hs132664921 | ATATTTTTAAATTTCCTGCTAGG | 10488 |
| hs132664862 | TGACGATTCAATCGTTTTGGTGG | 10489 |
| hs132664899 | ACTCTTTCTCTCAGACCCATTGG | 10490 |
| hs132664898 | AAGAGTAAGGGGTGATAAGGAGG | 10491 |
| hs132664947 | TGACAAGGTTGATTTAGAAAAGG | 10492 |
| hs132664913 | TAGCAGGTCCCAGAAGTCATTGG | 10493 |
| hs132664969 | TTAAGGAATCCTCATAGAAATGG | 10494 |
| hs132664952 | TTGCATACTGTAAAAAAGAATGG | 10495 |
| hs132665015 | CCTATTGATTATGCTCCAAATGG | 10496 |
| hs132664823 | ACATAATTTAGAGCATTAATGGG | 10497 |
| hs132664841 | GATAATAACACTTTTAAAAAGGG | 10498 |
| hs132664990 | TCTCAAATTACGATAATTTGAGG | 10499 |
| hs132664957 | GGATGGACTAAAACGTTTCCAGG | 10500 |
| hs132665018 | CCATTTGGAGCATAATCAATAGG | 10501 |
| hs132664832 | GCACATCATTTTGATATAAGAGG | 10502 |
| hs132664880 | TTAGAGAGCCTTATCAGAATTGG | 10503 |
| hs132664871 | TTAGTTGGTCCTCCAGAGTATGG | 10504 |
| hs132664806 | TCATCCTGTGCCATAGAGTATGG | 10505 |
| hs132664864 | ATTAAAGACGTTTAGCAAAATGG | 10506 |
| hs132664848 | CATTTTCTCTTTCTTCTAATGGG | 10507 |

What is claimed is:

1. A method of treating a subject with Duchenne muscular dystrophy (DMD), comprising:
administering to the subject a composition comprising an adeno-associated viral vector, an RNA-guided nuclease or nickase or a DNA endonuclease, and at least one dystrophin-targeted guide RNA in amount sufficient to delete a skippable exon encoding the dystrophin gene,
wherein the subject with DMD has a mutation causing a frameshift in the dystrophin gene and wherein the deletion of the skippable exon prevents the frameshift.

2. The method of claim 1, wherein the DNA endonuclease is a Cas9 endonuclease or a Cpf1 endonuclease.

3. The method of any of the preceding claims, wherein the composition comprises two dystrophin-targeted guide RNAs that recognize different DNA sequences.

4. The method of any of the preceding claims, wherein the skippable exon is selected from the group consisting of exon 2, exon 8, exon 17, exon 43, exon 44, exon 45, exon 46, exon 50, exon 51, exon 52, exon 53, and exon 55.

5. The method of any of the preceding claims, wherein the mutation is a deletion, an insertion, a duplication, or a translocation.

6. The method of claim 5, wherein the mutation is a deletion of exons 3-7, 3-19, 3-21, 4-7, 5-7, 6-7, 12-16, 18-33, 18-41, 18-44, 44, 44-47, 44-49, 44-51, 14-43, 19-43, 30-43, 35-43, 36-43, 40-43, 42-43, 45, 45-54, 12-44, 18-44, 46-47, 46-48, 46-49, 46-51, 46-53, 46-55, 21-45, 47-54, 47-56, 51, 51-53, 51-55, 45-50, 47-50, 48-50, 49-50, 50, 52, 52-63, 53, 53-55, 10-52, 45-52, 46-52, 47-52, 48-52, 49-52, 50-52, 45-54, or 48-54 of the dystrophin gene.

7. The method of any of the preceding claims, wherein the skippable exon is selected from the list in Table 1, based on the deleted exon or deleted exons that specifically occur in the dystrophin gene of the subject.

8. The method of any of the preceding claims, wherein preventing the frameshift in the dystrophin gene results in partial or complete restoration of dystrophin protein activity.

9. A method of treating a subject with Duchenne muscular dystrophy (DMD), comprising:
administering to the subject a composition comprising an adeno-associated viral vector, an RNA-guided nuclease or nickase or a DNA endonuclease, and at least one dystrophin targeted guide RNA in amount sufficient to restore the reading frame of the dystrophin gene in the subject;
wherein the dystrophin targeted guide RNA recognizes a target site in the dystrophin gene selected from the sequences identified in Table 2.

10. The method of claim 9, wherein the DNA endonuclease is a Cas9 endonuclease or a Cpf1 endonuclease.

11. The method of any one of claims 9-10, wherein the composition comprises two dystrophin-targeted guide RNAs that recognize different target sites.

12. The method of any one of claims 9-11, wherein one or more target sites recognized by the at least one dystrophin targeted guide RNA occur in an intron of the dystrophin gene.

13. The method of claims any one of 9-12, wherein restoration of the reading frame of the dystrophin gene results in partial or complete restoration of dystrophin protein activity.

14. A method of treating a subject with a genetic disease or disorder, comprising a gene editing strategy comprising:
administering to the subject a composition comprising an adeno-associated viral vector, an RNA-guided nuclease or nickase or a DNA endonuclease, at least one guide RNA, and optionally a donor DNA template in an amount sufficient to
(i) delete a skippable exon encoding a mutated gene, wherein such deletion prevents a frameshift of the mutated gene; or
(ii) correct the DNA sequence of the mutated gene via homology directed repair (HDR)
wherein the mutated gene is associated with the cause of the disease or disorder; and
wherein said method of treatment reduces at least one symptom associated with the disease or disorder.

15. The method of claim 14, wherein the DNA endonuclease is a Cas9 endonuclease or a Cpf1 endonuclease.

16. The method of any one of claims 14-15, wherein the composition comprises two guide RNAs that recognize different target sites.

17. The method of any one of claims claim 14-16, wherein the genetic disease or disorder is a muscle-related disease or disorder selected from the group consisting of Hypertrophic cardiomyopathy (HCM or CMH), amyotrophic lateral sclerosis, Becker's muscular dystrophy, central core disease, centronuclear myopathy (including myotubular myopathy), Charcot-Marie-Tooth disease, congenital muscular dystrophy, congenital myasthenic syndrome, Dejerine-Sottas disease, dermatomyositis, Duchenne muscular dystrophy, Emery-Dreifuss muscular dystrophy, facioscapulohumeral muscular dystrophy, Friedreich's ataxia, hyperthyroid myopathy, hypothyroid myopathy, inclusion body myositis, Lambert-Eaton myasthenic syndrome, Limb-girdle muscular dystrophy, mitochondrial myopathy, myasthenia gravis, myotonia congenita (including Thomsen's disease and Becker disease), nemaline myopathy, paramyotonia congenita, periodic paralysis (including hypokalemic and hyperkalemic), polymyositis, spinal and bulbar muscular atrophy, and spinal muscular atrophy.

18. The method of any one of claims 14-17, wherein the donor DNA template comprises a correct DNA sequence for insertion in the mutated gene via a homology directed repair mechanism.

19. The method of any one of claims 14-18, wherein the at least one guide RNA recognizes a target site in a gene selected from the group consisting of MYH7, TNNT2, TPM1, MYBPC3, PRKAG2, TNNI3, MYL3, TNN, MYL2, ACTC1, CSRP3, TNNC1, MYH6, VCL, MYOZ2, JPH2, PLN, CALR3, NEXN, MYPN, ACTN2, LDB3, TCAP, FLNC, SOD1, C9ORF72, and RYR.

20. The method of any one of claims 14-19, wherein the disease or disorder is suitable for treatment by an exon skipping therapeutic strategy.

21. The method of claim 20, wherein the disease or disorder is selected from the group comprising Ataxia-telangiectasia, congenital disorder of glycosylation, fronto-temporal dementia and parkinsonism linked to chromosome 17, Niemann-Pick disease type C, neurofibromatosis type 1, neurofibromatosis type 2, megalencephalic leukoencephalopathy with subcortical cysts type 1, Pelizaeus-Merzbacher disease, familial dysautonomia, Marfan syndrome, and Loeys-Dietz syndrome.

22. The method of any of the preceding claims, wherein the subject is a human.

The application's sequence listing, which the Patent Office published only in electronic form, follows.

SEQUENCE LISTING (10558 sequences)

SEQ ID NO: 1 - DNA, 23 bp, Artificial Sequence
  Description of Artificial Sequence: Synthetic oligonucleotide
agtggaagcgctgcaggtccagg

SEQ ID NO: 2 - DNA, 23 bp, Artificial Sequence
  Description of Artificial Sequence: Synthetic oligonucleotide
cgccctgggcaacaatcgcgtgg

SEQ ID NO: 3 - DNA, 23 bp, Artificial Sequence
  Description of Artificial Sequence: Synthetic oligonucleotide
ctggtgctcaacacgccgtaagg

SEQ ID NO: 4 - DNA, 23 bp, Artificial Sequence
  Description of Artificial Sequence: Synthetic oligonucleotide
acggcgtgttgagcaccagtcgg

SEQ ID NO: 5 - DNA, 4 bp, Unknown
  Description of Unknown: Protospacer-adjacent motif sequence
  modified_base (1)..(1): a, c, t, g, unknown or other
  modified_base (4)..(4): a, c, t, g, unknown or other
ngan

SEQ ID NO: 6 - DNA, 4 bp, Unknown
  Description of Unknown: Protospacer-adjacent motif sequence
  modified_base (1)..(1): a, c, t, g, unknown or other
  modified_base (3)..(3): a, c, t, g, unknown or other
ngng

SEQ ID NO: 7 - DNA, 4 bp, Unknown
  Description of Unknown: Protospacer-adjacent motif sequence
  modified_base (1)..(1): a, c, t, g, unknown or other
ngag

SEQ ID NO: 8 - DNA, 4 bp, Unknown
  Description of Unknown: Protospacer-adjacent motif sequence
  modified_base (1)..(1): a, c, t, g, unknown or other
ngcg

SEQ ID NO: 9 - DNA, 7 bp, Unknown
  Description of Unknown: Protospacer-adjacent motif sequence
  modified_base (1)..(2): a, c, t, g, unknown or other
nnagaaw

SEQ ID NO: 10 - DNA, 8 bp, Unknown
  Description of Unknown: Protospacer-adjacent motif sequence
  modified_base (1)..(4): a, c, t, g, unknown or other
nnnngatt

SEQ ID NO: 11 - DNA, 5 bp, Unknown
  Description of Unknown: Protospacer-adjacent motif sequence
  modified_base (1)..(1): a, c, t, g, unknown or other
ngrrt

SEQ ID NO: 12 - DNA, 5 bp, Unknown
  Description of Unknown: Protospacer-adjacent motif sequence
  modified_base (1)..(1): a, c, t, g, unknown or other
  modified_base (5)..(5): a, c, t, g, unknown or other
ngrrn

SEQ ID NO: 13 - DNA, 6 bp, Unknown
  Description of Unknown: Protospacer-adjacent motif sequence
  modified_base (1)..(1): a, c, t, g, unknown or other
naaaac

SEQ ID NO: 14 - DNA, 4 bp, Unknown
  Description of Unknown: Protospacer-adjacent motif sequence
tttv

SEQ ID NO: 15 - DNA, 23 bp, Artificial Sequence
  Description of Artificial Sequence: Synthetic oligonucleotide
cattggctttgatttccctaggg

SEQ ID NO: 16 - DNA, 23 bp, Artificial Sequence
  Description of Artificial Sequence: Synthetic oligonucleotide
acagttgcctaagaactggtggg

SEQ ID NO: 17 - DNA, 1447 bp, Artificial Sequence
  Description of Artificial Sequence: Synthetic polynucleotide
gagaggttatgtggctttaccaaggtcccagagttcctagggcagagaacaggattgtctaccagacattttaattctagtactatgcatcttaaccattaccataggctgacttactctacagtgtccaacactattcatattaagatttatttaatgactttgaaacagtatttcatgtctaaatagaaaaactactaactcgcatttttaagaaaatattgtatcttggtttttcttcactgctggccagtttactaacaatctgaaataaaaagaaaaaaatatgataaactgctcccagtataaaatacagagctaagacaagaacgtttcattggctttgatttccctagggtccagcttcaaattaatttacttcctattcaagggaattttaaatcagaaagaagatcttatcccatcttgttttgcctttgttttttcttgaataaaaaaaaaataagtaaaatttatttccctggcaaggtctgaaaacttttgttttctttaccacttccacaatgtatatgattgttactgagaaggcttatttaacttaagttacttgtccaggcatgagaatgagcaaaatcgttttttaaaaaattgttaaatgtatattaatgaaaaggttgaatcttttcattttctaccatgtattgctaaacaaagtatccacattgttagaaaaagatatataatgtcatgaataagagtttggctcaaattgttactcttcaattaaatttgacttattgttattgaaattggctctttagcttgtgtttctaatttttctttttcttcttttttcctttttgcaaaaacccaaaatattttagctcctactcagactgttactctggtgacacaacctgtggttactaaggaaactgccatctccaaactagaaatgccatcttccttgatgttggaggtacctgctctggcagatttcaaccgggcttggacagaacttaccgactggctttctctgcttgatcaagttataaaatcacagagggtgatggtgggtgaccttgaggatatcaacgagatgatcatcaagcagaaggtatgagaaaaaatgataaaagttggcagaagtttttctttaaaatgaagattttccaccaatcactttactctcctagaccatttcccaccagttcttaggcaactgtttctctctcagcaaacacattactctcactattcagcctaagtataatcaaggatataaattaatgcaaataacaaaagtagccatacattaaaaaggaaatatacaaaaaaaaaaaaaaaaaaaagcagaaaccttacaagaatagttgtctcagttaaatttactaaacaacctggtattttaaaaatctattttataccaaataagtcactcaactgagctatttacatttaaactgtttgttttggcactacgcag

SEQ ID NO: 18 - DNA, 22 bp, Artificial Sequence
  Description of Artificial Sequence: Synthetic primer
gagaggttatgtggctttacca

SEQ ID NO: 19 - DNA, 20 bp, Artificial Sequence
  Description of Artificial Sequence: Synthetic primer
ctgcgtagtgccaaaacaaa

SEQ ID NO: 20 - DNA, 23 bp, Artificial Sequence
  Description of Artificial Sequence: Synthetic oligonucleotide
aaggccaaacctcggcttacctg

SEQ ID NO: 21 - DNA, 23 bp, Artificial Sequence
  Description of Artificial Sequence: Synthetic oligonucleotide
aaagagcaataaaatggcttcaa

SEQ ID NO: 22 - DNA, 23 bp, Artificial Sequence
  Description of Artificial Sequence: Synthetic oligonucleotide
aaggccaaacctcggcttacctg

SEQ ID NO: 23 - DNA, 21 bp, Artificial Sequence
  Description of Artificial Sequence: Synthetic oligonucleotide
aaggccaaacctcggcttacc

SEQ ID NO: 24 - DNA, 25 bp, Artificial Sequence
  Description of Artificial Sequence: Synthetic oligonucleotide
tttaaaggccaaacctcggcttacc

SEQ ID NO: 25 - DNA, 4260 bp, Artificial Sequence
  Description of Artificial Sequence: Synthetic polynucleotide
gcggccgcggtccgactagttaattaaaaaaacaggtaagccgaggtttggccttatctacacttagtagaaattttcaggatgtagaccggccgccactataaggctcgaaagaggaataaatttttcgtttagggtgatttcccacaaagcacagcgcgtaatttgcatgcgctctaccccaggctcctgtgctagacaagaagcccgcgcatccgggcaagggatgatgacgtcgtccttcaagagcgccgccaccatggcccccaagaagaagaggaaagtgggaatccacggcgtgcctgccgccagcaagctggagaagtttacaaactgctactccctgtctaagaccctgcgcttcaaggccatccccgtgggcaagacccaggagaacatcgacaataagaggctgctggtggaggacgagaagagagccgaggattataagggcgtgaagaagctgctggataggtactatctgtcttttatcaacgacgtgctgcacagcatcaagctgaagaatctgaacaattacatcagcctgttcaggaagaagacaagaaccgagaaggagaataaggagctggagaacctggagatcaatctgagaaaggagatcgccaaggccttcaagggcaacgagggctacaagtccctgtttaagaaggatatcatcgagacaatcctgcctgagttcctggacgataaggacgagatcgccctggtgaacagcttcaatggctttaccacagccttcaccggcttctttgataacagagagaatatgttttccgaggaggccaagagcacatccatcgccttccggtgtatcaacgagaatctgacccgctacatctctaatatggacatcttcgagaaggtggacgccatctttgataagcacgaggtgcaggagatcaaggagaagatcctgaacagcgactatgatgtggaggatttctttgagggcgagttctttaactttgtgctgacacaggagggcatcgacgtgtacaatgccatcatcggcggcttcgtgaccgagagcggcgagaagatcaagggcctgaacgagtacatcaacctgtataatcagaagaccaagcagaagctgcctaagtttaagccactgtacaagcaggtgctgagcgatagggagtctctgagcttctacggcgagggctatacatccgatgaggaggtgctggaggtgtttagaaacaccctgaacaagaattccgagatcttcagctccatcaagaagctggagaagctgttcaagaattttgacgagtactctagcgccggcatctttgtgaagaacggccctgccatcagcacaatctccaaggatatcttcggcgagtggaacgtgatccgggacaagtggaatgccgagtatgacgatatccacctgaagaagaaggccgtggtgaccgagaagtacgaggacgataggagaaagtccttcaagaagatcggctccttttctctggagcagctgcaggagtacgccgacgccgatctgtctgtggtggagaagctgaaggagatcatcatccagaaggtggatgagatctacaaggtgtatggctcctctgagaagctgttcgacgccgattttgtgctggagaagagcctgaagaagaacgacgccgtggtggccatcatgaaggacctgctggattctgtgaagagcttcgagaattacatcaaggccttctttggcgagggcaaggagacaaaccgggacgagtccttctatggcgattttgtgctggcctacgacatcctgctgaaggtggaccacatctacgatgccatccgcaattatgtgacccagaagccatactctaaggataagttcaagctgtattttcagaacccccagttcatgggcggctgggacaaggataaggagacagactatagggccaccatcctgagatacggctccaagtactatctggccatcatggataagaagtacgccaagtgcctgcagaagatcgacaaggacgatgtgaacggcaattacgagaagatcaactataagctgctgcccggccctaataagatgctgcctaaggtgttcttttctaagaagtggatggcctactataacccaagcgaggacatccagaagatctacaagaatggcacattcaagaagggcgatatgtttaacctgaatgactgtcacaagctgatcgacttctttaaggatagcatctccaggtatcctaagtggtccaatgcctacgatttcaacttttctgagacagagaagtataaggacatcgccggcttttacagagaggtggaggagcagggctataaggtgagcttcgagtctgccagcaagaaggaggtggataagctggtggaggagggcaagctgtacatgttccagatctataacaaggacttttccgataagtctcacggcacaccaaatctgcacaccatgtacttcaagctgctgtttgacgagaacaatcacggccagatcaggctgagcggaggagcagagctgttcatgaggagggcctccctgaagaaggaggagctggtggtgcacccagcaaactcccctatcgccaacaagaatccagataatcccaagaagaccacaaccctgtcctacgacgtgtataaggataagaggttttctgaggaccagtacgagctgcacatcccaatcgccatcaataagtgccccaagaacatcttcaagatcaatacagaggtgagagtgctgctgaagcacgacgataacccatatgtgatcggcatcgatcggggcgagcgcaatctgctgtacatcgtggtggtggacggcaagggcaacatcgtggagcagtattccctgaacgagatcatcaacaacttcaacggcatccggatcaagacagattaccactctctgctggacaagaaggagaaggagcggttcgaggcccgccagaactggacctccatcgagaatatcaaggagctgaaggccggctatatctctcaggtggtgcacaagatctgcgagctggtggagaagtacgatgccgtgatcgccctggaggacctgaactctggctttaagaatagccgcgtgaaggtggagaagcaggtgtatcagaagttcgagaagatgctgatcgataagctgaactacatggtggacaagaagtctaatccatgtgcaacaggcggcgccctgaagggatatcagatcaccaataagttcgagagctttaagtccatgtctacccagaacggcttcatcttttacatccctgcctggctgacatccaagatcgacccatctaccggcttcgtgaacctgctgaagacaaagtataccagcatcgccgattccaagaagttcatcagctcctttgaccggatcatgtacgtgccagaggaggatctgttcgagtttgccctggactataagaacttctctcgcacagacgccgattacatcaagaagtggaagctgtacagctatggcaacaggatcagaatcttccggaatcccaagaagaacaacgtgttcgactgggaggaggtgtgcctgaccagcgcctataaggagctgttcaacaagtacggcatcaattatcagcagggcgatatccgcgccctgctgtgcgagcagtccgacaaggccttctactctagctttatggccctgatgagcctgatgctgcagatgcggaattccatcacaggccgcaccgacgtggattttctgatcagccccgtgaagaactccgacggcatcttctacgatagcaggaactatgaggcccaggagaatgccatcctgcctaagaacgccgacgccaatggcgcctataacatcgccagaaaggtgctgtgggccatcggccagttcaagaaggccgaggacgagaagctggataaggtgaagatcgccatctctaacaaggagtggctggagtacgcccagaccagcgtgaagcataaacgaccagccgcaactaaaaaggcagggcaggcaaagaagaagaaaggaagctaaccggtcagacatgataagatacattgatgagtttggacaaaccacaactagaatgcagtgaaaaaaatgctttatttgtgaaatttgtgatgctattgctttatttgtaaccattataagctgcaataaacaagttaacaacaacaattgcattcattttatgtttcaggttcagggggaggtgtgggaggttttttaaagctagcggccgc

SEQ ID NO: 26 - DNA, 4303 bp, Artificial Sequence
  Description of Artificial Sequence: Synthetic polynucleotide
gcggccgcggtccgactagttaattaaaaaaacaggtaagccgaggtttggccttatctacacttagtagaaattttgaagccattttattgctctttatctacacttagtagaaattttcaggatgtagaccggccgccactataaggctcgaaagaggaataaatttttcgtttagggtgatttcccacaaagcacagcgcgtaatttgcatgcgctctaccccaggctcctgtgctagacaagaagcccgcgcatccgggcaagggatgatgacgtcgtccttcaagagcgccgccaccatggcccccaagaagaagaggaaagtgggaatccacggcgtgcctgccgccagcaagctggagaagtttacaaactgctactccctgtctaagaccctgcgcttcaaggccatccccgtgggcaagacccaggagaacatcgacaataagaggctgctggtggaggacgagaagagagccgaggattataagggcgtgaagaagctgctggataggtactatctgtcttttatcaacgacgtgctgcacagcatcaagctgaagaatctgaacaattacatcagcctgttcaggaagaagacaagaaccgagaaggagaataaggagctggagaacctggagatcaatctgagaaaggagatcgccaaggccttcaagggcaacgagggctacaagtccctgtttaagaaggatatcatcgagacaatcctgcctgagttcctggacgataaggacgagatcgccctggtgaacagcttcaatggctttaccacagccttcaccggcttctttgataacagagagaatatgttttccgaggaggccaagagcacatccatcgccttccggtgtatcaacgagaatctgacccgctacatctctaatatggacatcttcgagaaggtggacgccatctttgataagcacgaggtgcaggagatcaaggagaagatcctgaacagcgactatgatgtggaggatttctttgagggcgagttctttaactttgtgctgacacaggagggcatcgacgtgtacaatgccatcatcggcggcttcgtgaccgagagcggcgagaagatcaagggcctgaacgagtacatcaacctgtataatcagaagaccaagcagaagctgcctaagtttaagccactgtacaagcaggtgctgagcgatagggagtctctgagcttctacggcgagggctatacatccgatgaggaggtgctggaggtgtttagaaacaccctgaacaagaattccgagatcttcagctccatcaagaagctggagaagctgttcaagaattttgacgagtactctagcgccggcatctttgtgaagaacggccctgccatcagcacaatctccaaggatatcttcggcgagtggaacgtgatccgggacaagtggaatgccgagtatgacgatatccacctgaagaagaaggccgtggtgaccgagaagtacgaggacgataggagaaagtccttcaagaagatcggctccttttctctggagcagctgcaggagtacgccgacgccgatctgtctgtggtggagaagctgaaggagatcatcatccagaaggtggatgagatctacaaggtgtatggctcctctgagaagctgttcgacgccgattttgtgctggagaagagcctgaagaagaacgacgccgtggtggccatcatgaaggacctgctggattctgtgaagagcttcgagaattacatcaaggccttctttggcgagggcaaggagacaaaccgggacgagtccttctatggcgattttgtgctggcctacgacatcctgctgaaggtggaccacatctacgatgccatccgcaattatgtgacccagaagccatactctaaggataagttcaagctgtattttcagaacccccagttcatgggcggctgggacaaggataaggagacagactatagggccaccatcctgagatacggctccaagtactatctggccatcatggataagaagtacgccaagtgcctgcagaagatcgacaaggacgatgtgaacggcaattacgagaagatcaactataagctgctgcccggccctaataagatgctgcctaaggtgttcttttctaagaagtggatggcctactataacccaagcgaggacatccagaagatctacaagaatggcacattcaagaagggcgatatgtttaacctgaatgactgtcacaagctgatcgacttctttaaggatagcatctccaggtatcctaagtggtccaatgcctacgatttcaacttttctgagacagagaagtataaggacatcgccggcttttacagagaggtggaggagcagggctataaggtgagcttcgagtctgccagcaagaaggaggtggataagctggtggaggagggcaagctgtacatgttccagatctataacaaggacttttccgataagtctcacggcacaccaaatctgcacaccatgtacttcaagctgctgtttgacgagaacaatcacggccagatcaggctgagcggaggagcagagctgttcatgaggagggcctccctgaagaaggaggagctggtggtgcacccagcaaactcccctatcgccaacaagaatccagataatcccaagaagaccacaaccctgtcctacgacgtgtataaggataagaggttttctgaggaccagtacgagctgcacatcccaatcgccatcaataagtgccccaagaacatcttcaagatcaatacagaggtgagagtgctgctgaagcacgacgataacccatatgtgatcggcatcgatcggggcgagcgcaatctgctgtacatcgtggtggtggacggcaagggcaacatcgtggagcagtattccctgaacgagatcatcaacaacttcaacggcatccggatcaagacagattaccactctctgctggacaagaaggagaaggagcggttcgaggcccgccagaactggacctccatcgagaatatcaaggagctgaaggccggctatatctctcaggtggtgcacaagatctgcgagctggtggagaagtacgatgccgtgatcgccctggaggacctgaactctggctttaagaatagccgcgtgaaggtggagaagcaggtgtatcagaagttcgagaagatgctgatcgataagctgaactacatggtggacaagaagtctaatccatgtgcaacaggcggcgccctgaagggatatcagatcaccaataagttcgagagctttaagtccatgtctacccagaacggcttcatcttttacatccctgcctggctgacatccaagatcgacccatctaccggcttcgtgaacctgctgaagacaaagtataccagcatcgccgattccaagaagttcatcagctcctttgaccggatcatgtacgtgccagaggaggatctgttcgagtttgccctggactataagaacttctctcgcacagacgccgattacatcaagaagtggaagctgtacagctatggcaacaggatcagaatcttccggaatcccaagaagaacaacgtgttcgactgggaggaggtgtgcctgaccagcgcctataaggagctgttcaacaagtacggcatcaattatcagcagggcgatatccgcgccctgctgtgcgagcagtccgacaaggccttctactctagctttatggccctgatgagcctgatgctgcagatgcggaattccatcacaggccgcaccgacgtggattttctgatcagccccgtgaagaactccgacggcatcttctacgatagcaggaactatgaggcccaggagaatgccatcctgcctaagaacgccgacgccaatggcgcctataacatcgccagaaaggtgctgtgggccatcggccagttcaagaaggccgaggacgagaagctggataaggtgaagatcgccatctctaacaaggagtggctggagtacgcccagaccagcgtgaagcataaacgaccagccgcaactaaaaaggcagggcaggcaaagaagaagaaaggaagctaaccggtcagacatgataagatacattgatgagtttggacaaaccacaactagaatgcagtgaaaaaaatgctttatttgtgaaatttgtgatgctattgctttatttgtaaccattataagctgcaataaacaagttaacaacaacaattgcattcattttatgtttcaggttcagggggaggtgtgggaggttttttaaagctagcggccgc

SEQ ID NO: 27 - skipped

SEQ ID NO: 28 - DNA, 4345 bp, Artificial Sequence
  Description of Artificial Sequence: Synthetic polynucleotide
gcggccgcggtccgactagttaattaaaaaaaggtaagccgaggtttggccttatctacaagagtagaaattaaaaaggtcttttgacttcaggatgtagaccggccgccactataaggctcgaaagaggaataaatttttcgtttagggtgatttcccacaaagcacagcgcgtaatttgcatgcgctctaccccaggctcctgtgctagacaagaagcccgcgcatccgggcaagggatgatgacgtcgtccttcaagagcgccgccaccatggcacccaagaagaaaagaaaggtcggaatccacggagtcccagcagctaacaatggaactaacaacttccagaacttcatcgggatcagctccctgcagaagaccctgaggaacgccctgatccccacagagacaacacagcagttcatcgtgaagaatggcatcatcaaggaggatgagctgaggggcgagaacagacagatcctgaaggacatcatggacgattactatagaggcttcatcagcgagacactgtctagcatcgacgatatcgactggacatccctgtttgagaagatggagatccagctgaagaatggcgataacaaggacaccctgatcaaggagcagacagagtacaggaaggccatccacaagaagttcgccaatgacgatagattcaagaacatgttttccgccaagctgatctctgacatcctgcctgagtttgtgatccacaacaataactatagcgcctccgagaaggaggagaagacccaggtcatcaagctgttcagccggtttgccacatccttcaaggactactttaagaatcgcgccaactgcttcagcgccgacgatatctcctctagctcctgtcaccggatcgtgaatgataacgccgagatcttcttttccaacgccctggtgtacaggagaatcgtgaagtctctgagcaatgacgatatcaacaagatctctggcgatatgaaggactctctgaaggagatgagcctggaggagatctacagctatgagaagtatggcgagttcatcacccaggagggcatctctttttacaacgacatctgcggcaaggtcaatagcttcatgaacctgtattgtcagaagaataaggagaataagaacctgtacaagctgcagaagctgcacaagcagatcctgtgcatcgccgatacaagctatgaggtgccatacaagttcgagtctgacgaggaggtgtaccagagcgtgaatggctttctggataacatctctagcaagcacatcgtggagaggctgagaaagatcggcgataattataacggctacaacctggacaagatctacatcgtgtccaagttctatgagtccgtgtctcagaagacctatcgcgactgggagacaatcaacacagccctggagatccactacaataacatcctgcccggcaacggcaagagcaaggccgataaggtgaagaaggccgtgaagaatgacctgcagaagtccatcaccgagatcaatgagctggtgagcaactataagctgtgctccgacgataacatcaaggccgagacatacatccacgagatcagccacatcctgaataacttcgaggcccaggagctgaagtataatcccgagatccacctggtggagtccgagctgaaggcctctgagctgaagaatgtgctggacgtgatcatgaacgccttccactggtgttccgtgtttatgaccgaggagctggtggacaaggataataacttttacgccgagctggaggagatctatgatgagatctaccctgtgatctccctgtacaatctggtgcggaactatgtgacccagaagccttactctacaaagaagatcaagctgaacttcggaatcccaaccctggccgacggatggagcaagtccaaggagtactctaataacgccatcatcctgatgcgcgataatctgtactatctgggcatctttaatgccaagaacaagcctgacaagaagatcatcgagggcaatacaagcgagaacaagggcgattataagaagatgatctacaatctgctgcccggccctaacaagatgatccccaaggtgttcctgtcctctaagaccggcgtggagacatataagcctagcgcctacatcctggagggctataagcagaacaagcacatcaagagctccaaggacttcgatatcaccttttgccacgatctgatcgactacttcaagaattgtatcgccatccacccagagtggaagaacttcggctttgatttctccgacacctctacatatgaggacatctccggcttttacagggaggtggagctgcagggctataagatcgattggacatacatctctgagaaggacatcgatctgctgcaggagaagggccagctgtacctgttccagatctataacaaggacttcagcaagaagagcaccggcaatgacaacctgcacacaatgtacctgaagaatctgttctccgaggagaacctgaaggacatcgtgctgaagctgaatggcgaggccgagatcttctttagaaagtctagcatcaagaatcctatcatccacaagaagggctctatcctggtgaacaggacctatgaggccgaggagaaggaccagttcggcaacatccagatcgtgagaaagaatatcccagagaacatctaccaggagctgtacaagtacttcaacgataagagcgacaaggagctgtccgatgaggccgccaagctgaagaatgtggtgggacaccacgaggcagcaaccaacatcgtgaaggattacaggtacacatacgacaagtacttcctgcacatgccaatcaccatcaatttcaaggccaacaagacaggctttatcaacgaccgcatcctgcagtatatcgccaaggagaaggatctgcacgtgatcggaatcgaccggggcgagcgcaatctgatctacgtgtctgtgatcgacacctgtggcaacatcgtggagcagaagagctttaatatcgtgaacggctatgattaccagatcaagctgaagcagcaggagggagcaaggcagatcgcacgcaaggagtggaaggagatcggcaagatcaaggagatcaaggagggctacctgagcctggtcatccacgagatctctaagatggtcatcaagtataacgccatcatcgctatggaggacctgagctatggcttcaagaagggccggtttaaggtggagcgccaggtgtatcagaagttcgagacaatgctgatcaataagctgaactacctggtgtttaaggacatctccatcaccgagaacggcggcctgctgaagggctatcagctgacatacatccctgataagctgaagaatgtgggccaccagtgcggctgtatcttctacgtgccagccgcctatacctccaagatcgaccccaccacaggctttgtgaacatctttaagttcaaggatctgacagtggacgccaagcgggagttcatcaagaagtttgattctatccgctatgacagcgagaagaacctgttttgcttcacctttgattacaataacttcatcacccagaatacagtgatgtccaagtcctcttggagcgtgtacacatacggcgtgaggatcaagcggcgcttcgtgaatggcagattttctaacgagagcgataccatcgacatcacaaaggatatggagaagaccctggagatgacagacatcaactggagggatggccacgacctgagacaggatatcatcgactacgagatcgtgcagcacatcttcgagatctttcggctgaccgtgcagatgcgcaactctctgagcgagctggaggacagggattatgacagactgatctccccagtgctgaatgagaataacatcttctacgattctgccaaggcaggcgacgcactgccaaaggatgcagacgcaaacggcgcctattgtatcgccctgaagggcctgtacgagatcaagcagatcacagagaactggaaggaggatggcaagtttagcagagacaagctgaagatctccaataaggactggttcgactttattcagaacaagaggtatctgcctaagaagaagaggaaggtgtaaccggtcagacatgataagatacattgatgagtttggacaaaccacaactagaatgcagtgaaaaaaatgctttatttgtgaaatttgtgatgctattgctttatttgtaaccattataagctgcaataaacaagttaacaacaacaattgcattcattttatgtttcaggttcagggggaggtgtgggaggttttttaaagctagcggccgc

SEQ ID NO: 29 - DNA, 23 bp, Homo sapiens
tatgacaagagacatccatgggg

SEQ ID NO: 30 - DNA, 23 bp, Homo sapiens
aaaatgtgtaagtagcactgtgg

SEQ ID NO: 31 - DNA, 23 bp, Homo sapiens
atacttatattcaagcacagggg

SEQ ID NO: 32 - DNA, 23 bp, Homo sapiens
taggaagattctatgcacagggg

SEQ ID NO: 33 - DNA, 23 bp, Homo sapiens
aaagaacctaaagtacacagggg

SEQ ID NO: 34 - DNA, 23 bp, Homo sapiens
catgtagattagcctcacagggg

SEQ ID NO: 35 - DNA, 23 bp, Homo sapiens
attgagattagagcaacacgggg

SEQ ID NO: 36 - DNA, 23 bp, Homo sapiens
tgcaactaaatatcacactgtgg

SEQ ID NO: 37 - DNA, 23 bp, Homo sapiens
tcagatagtctactaccacgtgg

SEQ ID NO: 38 - DNA, 23 bp, Homo sapiens
tgttatgaacagatgttacgtgg

SEQ ID NO: 39 - DNA, 23 bp, Homo sapiens
cgggtggggaaagaaatatgcgg

SEQ ID NO: 40 - DNA, 23 bp, Homo sapiens
tccaaaccagaatagcacagtgg

SEQ ID NO: 41 - DNA, 23 bp, Homo sapiens
atgacaagagacatccatggggg

SEQ ID NO: 42 - DNA, 23 bp, Homo sapiens
acacccagattaaggcatcgggg

SEQ ID NO: 43 - DNA, 23 bp, Homo sapiens
ggatcaggaaggtctcactgtgg

SEQ ID NO: 44 - DNA, 23 bp, Homo sapiens
gaagatgtcagggaaccctgggg

SEQ ID NO: 45 - DNA, 23 bp, Homo sapiens
aagactattacaataaaacgggg

SEQ ID NO: 46 - DNA, 23 bp, Homo sapiens
aagatctgggaacaactacgtgg

SEQ ID NO: 47 - DNA, 23 bp, Homo sapiens
acaggaatctgggaacactgagg

SEQ ID NO: 48 - DNA, 23 bp, Homo sapiens
tttctacaatctcatcactgtgg

SEQ ID NO: 49 - DNA, 23 bp, Homo sapiens
gaccaccctaaaaatcaccaggg

SEQ ID NO: 50 - DNA, 23 bp, Homo sapiens
atgctttctctaaaacacagagg

SEQ ID NO: 51 - DNA, 23 bp, Homo sapiens
tcaattagtacaaagccatgggg

SEQ ID NO: 52 - DNA, 23 bp, Homo sapiens
tatcgtaccgatgaaccctgagg

SEQ ID NO: 53 - DNA, 23 bp, Homo sapiens
aaatagacacgattgctacgtgg

SEQ ID NO: 54 - DNA, 23 bp, Homo sapiens
gtttcatgaataaagcccagagg

SEQ ID NO: 55 - DNA, 23 bp, Homo sapiens
acagacaccccaaatcctggagg

SEQ ID NO: 56 - DNA, 23 bp, Homo sapiens
gggtgatttcaaagccacagagg

SEQ ID NO: 57 - DNA, 23 bp, Homo sapiens
gcacttggctggtaatacagggg

SEQ ID NO: 58 - DNA, 23 bp, Homo sapiens
ttagtggtcagcttacaatgagg

SEQ ID NO: 59 - DNA, 23 bp, Homo sapiens
cttgactcaattctcctgagcgg

SEQ ID NO: 60 - DNA, 23 bp, Homo sapiens
cttacacatgacctccccagagg

SEQ ID NO: 61 - DNA, 23 bp, Homo sapiens
aatcttaggagtaattaccacgg

SEQ ID NO: 62 - DNA, 23 bp, Homo sapiens
ttgcattccaagaatcacagtgg

SEQ ID NO: 63 - DNA, 23 bp, Homo sapiens
gtcatccaaatatatcccagggg

SEQ ID NO: 64 - DNA, 23 bp, Homo sapiens
tgtaactggagacaagaaggggg

SEQ ID NO: 65 - DNA, 23 bp, Homo sapiens
tcaaccaatatggatcactgtgg

SEQ ID NO: 66 - DNA, 23 bp, Homo sapiens
ccaaactgataagtcctcagggg

SEQ ID NO: 67 - DNA, 23 bp, Homo sapiens
aattgtccagtaaatccatgtgg

SEQ ID NO: 68 - DNA, 23 bp, Homo sapiens
actgtataggaactacatggagg

SEQ ID NO: 69 - DNA, 23 bp, Homo sapiens
aatcatactgaatatcactgagg

SEQ ID NO: 70 - DNA, 23 bp, Homo sapiens
tttattttattctctctacgggg

SEQ ID NO: 71 - DNA, 23 bp, Homo sapiens
actgggaagctcttccacagtgg

SEQ ID NO: 72 - DNA, 23 bp, Homo sapiens
tagggaggaatcccacaatgggg

SEQ ID NO: 73 - DNA, 23 bp, Homo sapiens
aatcccctacattctcagggagg

SEQ ID NO: 74 - DNA, 23 bp, Homo sapiens
gaagtgcttgaagaggaacaggg

SEQ ID NO: 75 - DNA, 23 bp, Homo sapiens
taaatgagagaagcccatggtgg

SEQ ID NO: 76 - DNA, 23 bp, Homo sapiens
catcatctcctacttcactgggg

SEQ ID NO: 77 - DNA, 23 bp, Homo sapiens
cagactcttaagcagcagtgggg

SEQ ID NO: 78 - DNA, 23 bp, Homo sapiens
gaatgaaaacaaacccaccgtgg

SEQ ID NO: 79 - DNA, 23 bp, Homo sapiens
cagacattcaaaattctgggtgg

SEQ ID NO: 80 - DNA, 23 bp, Homo sapiens
tcttctgtgactatgcagggtgg

SEQ ID NO: 81 - DNA, 23 bp, Homo sapiens
aaagtgaaagagcctcctcgagg

SEQ ID NO: 82 - DNA, 23 bp, Homo sapiens
gagataaagagaaagattggggg

SEQ ID NO: 83 - DNA, 23 bp, Homo sapiens
gtgtaaagaacactacaacacgg

SEQ ID NO: 84 - DNA, 23 bp, Homo sapiens
tgactaaacactgagccatgagg

SEQ ID NO: 85 - DNA, 23 bp, Homo sapiens
tctattggcaatgtacactgagg

SEQ ID NO: 86 - DNA, 23 bp, Homo sapiens
cagagatgtgacatccaatgtgg

SEQ ID NO: 87 - DNA, 23 bp, Homo sapiens
ataatagacatgaaacaacaagg

SEQ ID NO: 88 - DNA, 23 bp, Homo sapiens
ataagcgggtagcagtcctgcgg

SEQ ID NO: 89 - DNA, 23 bp, Homo sapiens
ataaatatgatgatcccaggagg

SEQ ID NO: 90 - DNA, 23 bp, Homo sapiens
ctacaggactcagatctgggagg

SEQ ID NO: 91 - DNA, 23 bp, Homo sapiens
tctaggctagagtaaagctgtgg

SEQ ID NO: 92 - DNA, 23 bp, Homo sapiens
aattgcgtatggcttcatgtggg

SEQ ID NO: 93 - DNA, 23 bp, Homo sapiens
gatcaagatcaagaccggtgtgg

SEQ ID NO: 94 - DNA, 23 bp, Homo sapiens
tcaccacagcaaccccagggagg

SEQ ID NO: 95 - DNA, 23 bp, Homo sapiens
agtatgtgacgtcaattgagtgg

SEQ ID NO: 96 - DNA, 23 bp, Homo sapiens
agcagtcctcagtaactcagggg

SEQ ID NO: 97 - DNA, 23 bp, Homo sapiens
actctgggacatgaatctagagg

SEQ ID NO: 98 - DNA, 23 bp, Homo sapiens
ctgttaccagtacagtacagtgg

SEQ ID NO: 99 - DNA, 23 bp, Homo sapiens
cctgggaagtcaatgtacagtgg

SEQ ID NO: 100 - DNA, 23 bp, Homo sapiens
tgtgtgttaggcctggactgagg

SEQ ID NO: 101 - DNA, 23 bp, Homo sapiens
atgttaagccctcagcatcgagg

SEQ ID NO: 102 - DNA, 23 bp, Homo sapiens
gtaagagaaaagtaccaacaggg

SEQ ID NO: 103 - DNA, 23 bp, Homo sapiens
catttcttgagaaatccttgggg

SEQ ID NO: 104 - DNA, 23 bp, Homo sapiens
agaacaataacactaccacccgg

SEQ ID NO: 105 - DNA, 23 bp, Homo sapiens
actgtggtttaaatgcagtgagg

SEQ ID NO: 106 - DNA, 23 bp, Homo sapiens
ttaccagtacagtacagtggtgg

SEQ ID NO: 107 - DNA, 23 bp, Homo sapiens
tagagctgtgtgaatccatgggg

SEQ ID NO: 108 - DNA, 23 bp, Homo sapiens
cgattaggtcacaaccaatgggg

SEQ ID NO: 109 - DNA, 23 bp, Homo sapiens
agtggacttaggaaggtacaggg

SEQ ID NO: 110 - DNA, 23 bp, Homo sapiens
gtggaaataatggtagatgtggg

SEQ ID NO: 111 - DNA, 23 bp, Homo sapiens
tccaaacagacagaaataggtgg

SEQ ID NO: 112 - DNA, 23 bp, Homo sapiens
atatctactgtgaaatactgtgg

SEQ ID NO: 113 - DNA, 23 bp, Homo sapiens
gggtacctgagggatctgtgagg

SEQ ID NO: 114 - DNA, 23 bp, Homo sapiens
gaggtattgaaggaatccagcgg

SEQ ID NO: 115 - DNA, 23 bp, Homo sapiens
tcttaaatgagagaagcccatgg

SEQ ID NO: 116 - DNA, 23 bp, Homo sapiens
aacagtattagagaaaaccaggg

SEQ ID NO: 117 - DNA, 23 bp, Homo sapiens
gtgccatagagcactcttggggg

SEQ ID NO: 118 - DNA, 23 bp, Homo sapiens
cttggctggatatcgaacagtgg

SEQ ID NO: 119 - DNA, 23 bp, Homo sapiens
ttcatacacactcatcatggggg

SEQ ID NO: 120 - DNA, 23 bp, Homo sapiens
tgtggtttaaatgcagtgagggg

SEQ ID NO: 121 - DNA, 23 bp, Homo sapiens
gtataacaaagaaataaccgtgg

SEQ ID NO: 122 - DNA, 23 bp, Homo sapiens
cagggtcaacaagctaacagtgg

SEQ ID NO: 123 - DNA, 23 bp, Homo sapiens
accacaaacagcactccacgtgg

SEQ ID NO: 124 - DNA, 23 bp, Homo sapiens
gacatccaatgtggtctgtgggg

SEQ ID NO: 125 - DNA, 23 bp, Homo sapiens
tgtgtgcaaaggtaacaaagagg

SEQ ID NO: 126 - DNA, 23 bp, Homo sapiens
aaatggccctatgcagacaaggg

SEQ ID NO: 127 - DNA, 23 bp, Homo sapiens
ttagtaacaacctagtaacacgg

SEQ ID NO: 128 - DNA, 23 bp, Homo sapiens
ggatcagaattgaaactgagggg

SEQ ID NO: 129 - DNA, 23 bp, Homo sapiens
gatgaattcaacacacccggagg

SEQ ID NO: 130 - DNA, 23 bp, Homo sapiens
atgaatagtgaccatgtgagtgg

SEQ ID NO: 131 - DNA, 23 bp, Homo sapiens
ggttgagtgtttatgcacagagg

SEQ ID NO: 132 - DNA, 23 bp, Homo sapiens
gcaagaaagatacagtctagggg

SEQ ID NO: 133 - DNA, 23 bp, Homo sapiens
actctgtctctgtaatactgagg

SEQ ID NO: 134 - DNA, 23 bp, Homo sapiens
taagccacaagtgtaatgggggg

SEQ ID NO: 135 - DNA, 23 bp, Homo sapiens
aaagcttaaagctaacggagggg

SEQ ID NO: 136 - DNA, 23 bp, Homo sapiens
gaatacgtaattgaaaaccatgg

SEQ ID NO: 137 - DNA, 23 bp, Homo sapiens
gggtaacaaagttaaaaccaagg

SEQ ID NO: 138 - DNA, 23 bp, Homo sapiens
gtacataaactaccaatgggagg

SEQ ID NO: 139 - DNA, 23 bp, Homo sapiens
gttgaaaccacatgttgtggagg

SEQ ID NO: 140 - DNA, 23 bp, Homo sapiens
cttcaggtagatgatgacagggg

SEQ ID NO: 141 - DNA, 23 bp, Homo sapiens
actacttgaacacaccgcagtgg

SEQ ID NO: 142 - DNA, 23 bp, Homo sapiens
tgggacccgcctgttcagagggg

SEQ ID NO: 143 - DNA, 23 bp, Homo sapiens
agaccctacactatgcaagtggg

SEQ ID NO: 144 - DNA, 23 bp, Homo sapiens
gattgagggtagaatgacaaggg

SEQ ID NO: 145 - DNA, 23 bp, Homo sapiens
acactcactcaatatcatagggg

SEQ ID NO: 146 - DNA, 23 bp, Homo sapiens
gaatggcatagagcccccaacgg

SEQ ID NO: 147 - DNA, 23 bp, Homo sapiens
tgctacctatatattcccagtgg

SEQ ID NO: 148 - DNA, 23 bp, Homo sapiens
aatgagatagggattcaacaagg

SEQ ID NO: 149 - DNA, 23 bp, Homo sapiens
atttgggtcaaagagaagggagg

SEQ ID NO: 150 - DNA, 23 bp, Homo sapiens
tggtcttgtagacttacccgagg

SEQ ID NO: 151 - DNA, 23 bp, Homo sapiens
attgtggccagctcccagggtgg

SEQ ID NO: 152 - DNA, 23 bp, Homo sapiens
tttcagctagaaatgagctgtgg

SEQ ID NO: 153 - DNA, 23 bp, Homo sapiens
atggtcatcccatagtaccaagg

SEQ ID NO: 154 - DNA, 23 bp, Homo sapiens
ttatgaatgatattcaaccacgg

SEQ ID NO: 155 - DNA, 23 bp, Homo sapiens
gcactgcagagttccagcagagg

SEQ ID NO: 156 - DNA, 23 bp, Homo sapiens
agctataagtgatttaacagggg

SEQ ID NO: 157 - DNA, 23 bp, Homo sapiens
tatggcaaactaaagaaaggggg

SEQ ID NO: 158 - DNA, 23 bp, Homo sapiens
ggactttgatgaggaccatgcgg

SEQ ID NO: 159 - DNA, 23 bp, Homo sapiens
cacaaagtttgaacacatcgagg

SEQ ID NO: 160 - DNA, 23 bp, Homo sapiens
cggatgctggccataaacagggg

SEQ ID NO: 161 - DNA, 23 bp, Homo sapiens
aatttgaagaataagaacagagg

SEQ ID NO: 162 - DNA, 23 bp, Homo sapiens
ttgagataccaaaataaacaggg

SEQ ID NO: 163 - DNA, 23 bp, Homo sapiens
acgaaagcatggtagtttggggg

SEQ ID NO: 164 - DNA, 23 bp, Homo sapiens
atatagtaagaaaccctgagagg

SEQ ID NO: 165 - DNA, 23 bp, Homo sapiens
ttatcctaaagcaatagacaagg

SEQ ID NO: 166 - DNA, 23 bp, Homo sapiens
tcagccggggagcaaaaccaggg

SEQ ID NO: 167 - DNA, 23 bp, Homo sapiens
agaatgatctgtaatctctgagg

SEQ ID NO: 168 - DNA, 23 bp, Homo sapiens
agaattgcatagttatgacaagg

SEQ ID NO: 169 - DNA, 23 bp, Homo sapiens
aaaacagcattggttccaagtgg

SEQ ID NO: 170 - DNA, 23 bp, Homo sapiens
aatctaggcagctattccagggg

SEQ ID NO: 171 - DNA, 23 bp, Homo sapiens
aaataagtagtaaacaaaggggg

SEQ ID NO: 172 - DNA, 23 bp, Homo sapiens
accttacagtgcaagcagggagg

SEQ ID NO: 173 - DNA, 23 bp, Homo sapiens
agatgattacaaacaaaccaggg

SEQ ID NO: 174 - DNA, 23 bp, Homo sapiens
tcactaccaggaccttagtgagg

SEQ ID NO: 175 - DNA, 23 bp, Homo sapiens
atagctattaggtctatgtgagg

SEQ ID NO: 176 - DNA, 23 bp, Homo sapiens
gtggtgagcaagaacagttgagg

SEQ ID NO: 177 - DNA, 23 bp, Homo sapiens
ccaacggtaccagcaatgtgggg

SEQ ID NO: 178 - DNA, 23 bp, Homo sapiens
atttcaaacagaaaccagcaggg

SEQ ID NO: 179 - DNA, 23 bp, Homo sapiens
taaacactgagccatgaggtggg

SEQ ID NO: 180 - DNA, 23 bp, Homo sapiens
ttgtcaatgggtatgatacgtgg

SEQ ID NO: 181 - DNA, 23 bp, Homo sapiens
ggctggcttgaaaatcaggaggg

SEQ ID NO: 182 - DNA, 23 bp, Homo sapiens
tctctatggtaacagacacaagg

SEQ ID NO: 183 - DNA, 23 bp, Homo sapiens
tgactgtttaggagacacacagg

SEQ ID NO: 184 - DNA, 23 bp, Homo sapiens
ataacagcaagggatagggaagg

SEQ ID NO: 185 - DNA, 23 bp, Homo sapiens
ccatattttatagagaacagtgg

SEQ ID NO: 186 - DNA, 23 bp, Homo sapiens
attcaatcacctatacaatgtgg

SEQ ID NO: 187 - DNA, 23 bp, Homo sapiens
ggaagattgagtgaatacactgg

SEQ ID NO: 188 - DNA, 23 bp, Homo sapiens
atggggtatggtaaacctggagg

SEQ ID NO: 189 - DNA, 23 bp, Homo sapiens
tttcgcatagacatctgaggagg

SEQ ID NO: 190 - DNA, 23 bp, Homo sapiens
ggaggccttatcaaacaccaggg

SEQ ID NO: 191 - DNA, 23 bp, Homo sapiens
cctggaatttgaaatatccgggg

SEQ ID NO: 192 - DNA, 23 bp, Homo sapiens
aaaacctcagtatgaaaacgggg

SEQ ID NO: 193 - DNA, 23 bp, Homo sapiens
aagtgattgaaggatgacaaagg

SEQ ID NO: 194 - DNA, 23 bp, Homo sapiens
ggtaaccacaaagtaccagaggg

SEQ ID NO: 195 - DNA, 23 bp, Homo sapiens
gaagcctgatggagattaggtgg

SEQ ID NO: 196 - DNA, 23 bp, Homo sapiens
ttgctaatactgatgacaagtgg

SEQ ID NO: 197 - DNA, 23 bp, Homo sapiens
gatgtggtataaaaattgtgagg

SEQ ID NO: 198 - DNA, 23 bp, Homo sapiens
acgaaaggcattatggtaggggg

SEQ ID NO: 199 - DNA, 23 bp, Homo sapiens
tgatccctgaaatccagcagtgg

SEQ ID NO: 200 - DNA, 23 bp, Homo sapiens
ggagatggcgctaatctgggagg

SEQ ID NO: 201 - DNA, 23 bp, Homo sapiens
tctagggtgaaattacacgctgg

SEQ ID NO: 202 - DNA, 23 bp, Homo sapiens
acaagaactaaatttgccagggg

SEQ ID NO: 203 - DNA, 23 bp, Homo sapiens
aaggaaataaaagtatggcgggg

SEQ ID NO: 204 - DNA, 23 bp, Homo sapiens
tgatatccagcatagatgggggg

SEQ ID NO: 205 - DNA, 23 bp, Homo sapiens
tctacattatggaaactcagagg

SEQ ID NO: 206 - DNA, 23 bp, Homo sapiens
tgaagagataaaaacaagcgggg

SEQ ID NO: 207 - DNA, 23 bp, Homo sapiens
gaaagccattcacctcgaggagg

SEQ ID NO: 208 - DNA, 23 bp, Homo sapiens
aggccctcaaatcttcctggagg

SEQ ID NO: 209 - DNA, 23 bp, Homo sapiens
gaaaacttaggaatttactgtgg

SEQ ID NO: 210 - DNA, 23 bp, Homo sapiens
attttcctagcatatctctgagg

SEQ ID NO: 211 - DNA, 23 bp, Homo sapiens
ataattgagaattagtgcagggg

SEQ ID NO: 212 - DNA, 23 bp, Homo sapiens
cagggggaaaaaaatcttcgggg

SEQ ID NO: 213 - DNA, 23 bp, Homo sapiens
ggagaaaaaagtactcacaaggg

SEQ ID NO: 214 - DNA, 23 bp, Homo sapiens
gcttatattagccaaagcagagg

SEQ ID NO: 215 - DNA, 23 bp, Homo sapiens
agcatgcttcttcaccactgtgg

SEQ ID NO: 216 - DNA, 23 bp, Homo sapiens
acacatagatagaactcacacgg

SEQ ID NO: 217 - DNA, 23 bp, Homo sapiens
aaattgagattagagcaacacgg

SEQ ID NO: 218 - DNA, 23 bp, Homo sapiens
gaacatggcagttataacacagg

SEQ ID NO: 219 - DNA, 23 bp, Homo sapiens
atatcagggctattgagcagggg

SEQ ID NO: 220 - DNA, 23 bp, Homo sapiens
cccccagttaaaatgaacagtgg

SEQ ID NO: 221 - DNA, 23 bp, Homo sapiens
tatttattgttccgactcagggg

SEQ ID NO: 222 - DNA, 23 bp, Homo sapiens
agttactctcccattcgaagggg

SEQ ID NO: 223 - DNA, 23 bp, Homo sapiens
cattgctgtaacacagacaaggg

SEQ ID NO: 224 - DNA, 23 bp, Homo sapiens
tctggatcagcattcaacaaagg

SEQ ID NO: 225 - DNA, 23 bp, Homo sapiens
agtcctccctgagaatgtagggg

SEQ ID NO: 226 - DNA, 23 bp, Homo sapiens
tgtgacgacgatcattggtgggg

SEQ ID NO: 227 - DNA, 23 bp, Homo sapiens
tactcgatcctacaagtgcgtgg

SEQ ID NO: 228 - DNA, 23 bp, Homo sapiens
agatgatgaagtttggacaatgg

SEQ ID NO: 229 - DNA, 23 bp, Homo sapiens
gccacagggacagaagtaagcgg

SEQ ID NO: 230 - DNA, 23 bp, Homo sapiens
taatagcaaagaggtaaacgtgg

SEQ ID NO: 231 - DNA, 23 bp, Homo sapiens
taaacaaccctaaggcagtgagg

SEQ ID NO: 232 - DNA, 23 bp, Homo sapiens
gtaaaaaaataattctaacaggg

SEQ ID NO: 233 - DNA, 23 bp, Homo sapiens
caacacatctcttcatacagagg

SEQ ID NO: 234 - DNA, 23 bp, Homo sapiens
aattgcatataactaatctgggg

SEQ ID NO: 235 - DNA, 23 bp, Homo sapiens
atatagttcttataatagtgggg

SEQ ID NO: 236 - DNA, 23 bp, Homo sapiens
ataccaagtatggtaacacatgg

SEQ ID NO: 237 - DNA, 23 bp, Homo sapiens
aatgaaataagtatagaacatgg

SEQ ID NO: 238 - DNA, 23 bp, Homo sapiens
acgcacttgtaggatcgagtagg

SEQ ID NO: 239 - DNA, 23 bp, Homo sapiens
agcaaggagtagatacagggagg

SEQ ID NO: 240 - DNA, 23 bp, Homo sapiens
agggagcatataatacacaaagg

SEQ ID NO: 241 - DNA, 23 bp, Homo sapiens
ctggaatttgaaatatccggggg

SEQ ID NO: 242 - DNA, 23 bp, Homo sapiens
gcagcagtaacaaacgaacaggg

SEQ ID NO: 243 - DNA, 23 bp, Homo sapiens
aaatagtgcccaatcctaggtgg

SEQ ID NO: 244 - DNA, 23 bp, Homo sapiens
tggtaaccacaaagtaccagagg

SEQ ID NO: 245 - DNA, 23 bp, Homo sapiens
gttcccattagtgaggaatgggg

SEQ ID NO: 246 - DNA, 23 bp, Homo sapiens
ttgcagatttagattaactgggg

SEQ ID NO: 247 - DNA, 23 bp, Homo sapiens
tatgttctgtacatcagccgggg

SEQ ID NO: 248 - DNA, 23 bp, Homo sapiens
agtcctgctatagtcctaggagg

SEQ ID NO: 249 - DNA, 23 bp, Homo sapiens
atgacaactggaaacgtaggtgg

SEQ ID NO: 250 - DNA, 23 bp, Homo sapiens
aaaatagtatgagcatgcaacgg

SEQ ID NO: 251 - DNA, 23 bp, Homo sapiens
aaaaacaaaacatatcacaaagg

SEQ ID NO: 252 - DNA, 23 bp, Homo sapiens
tgacaatcatgggaacgacaagg

SEQ ID NO: 253 - DNA, 23 bp, Homo sapiens
tgccaacctgaagaacgtgaggg

SEQ ID NO: 254 - DNA, 23 bp, Homo sapiens
gataagcagctaacatgtgtcgg

SEQ ID NO: 255 - DNA, 23 bp, Homo sapiens
ataatgtgaagtaatatgcatgg

SEQ ID NO: 256 - DNA, 23 bp, Homo sapiens
tgtctaaattactattcacaagg

SEQ ID NO: 257 - DNA, 23 bp, Homo sapiens
aaggatttaaaaatggactgtgg

SEQ ID NO: 258 - DNA, 23 bp, Homo sapiens
acttttgattgaatcccaagggg

SEQ ID NO: 259 - DNA, 23 bp, Homo sapiens
cagcctctgagccctcaaggtgg

SEQ ID NO: 260 - DNA, 23 bp, Homo sapiens
tgtgccatagagcactcttgggg

SEQ ID NO: 261 - DNA, 23 bp, Homo sapiens
gtgtccttgaaggtgcattgtgg

SEQ ID NO: 262 - DNA, 23 bp, Homo sapiens
ggttcagtgaaaccttcgtgagg

SEQ ID NO: 263 - DNA, 23 bp, Homo sapiens
aatagtgctatgcacacacaagg

SEQ ID NO: 264 - DNA, 23 bp, Homo sapiens
caataagtaagcttgtgaagggg

SEQ ID NO: 265 - DNA, 23 bp, Homo sapiens
aaaacaacgacgaagtggggagg

SEQ ID NO: 266 - DNA, 23 bp, Homo sapiens
cctattctgagcatgcccagtgg

SEQ ID NO: 267 - DNA, 23 bp, Homo sapiens
gtaaacgtggcagaaagcagggg

SEQ ID NO: 268 - DNA, 23 bp, Homo sapiens
gcatataaagcagacccaagagg

SEQ ID NO: 269 - DNA, 23 bp, Homo sapiens
atataaaagagaatttagtgagg

SEQ ID NO: 270 - DNA, 23 bp, Homo sapiens
aggccattgaacaatttgagggg

SEQ ID NO: 271 - DNA, 23 bp, Homo sapiens
gatatgattccttcaccatgagg

SEQ ID NO: 272 - DNA, 23 bp, Homo sapiens
gtataatatcaaaaagatggggg

SEQ ID NO: 273 - DNA, 23 bp, Homo sapiens
tatgggtaaatataagaacatgg

SEQ ID NO: 274 - DNA, 23 bp, Homo sapiens
aactctctgatggagttgtgggg

SEQ ID NO: 275 - DNA, 23 bp, Homo sapiens
gcgaagccactacccatgggggg

SEQ ID NO: 276 - DNA, 23 bp, Homo sapiens
atatgtactgaaagcaactgcgg

SEQ ID NO: 277 - DNA, 23 bp, Homo sapiens
aagaaatgttggcttgtaggtgg

SEQ ID NO: 278 - DNA, 23 bp, Homo sapiens
acaacgcataaagagaacacagg

SEQ ID NO: 279 - DNA, 23 bp, Homo sapiens
aatctaagtggaagtccaagggg

SEQ ID NO: 280 - DNA, 23 bp, Homo sapiens
ccttgtagttatcccacatgggg

SEQ ID NO: 281 - DNA, 23 bp, Homo sapiens
gggtgacgtgcatatgtgcgtgg

SEQ ID NO: 282 - DNA, 23 bp, Homo sapiens
agacatttaatatatgcccaggg

SEQ ID NO: 283 - DNA, 23 bp, Homo sapiens
taggagttcagagcatggtgagg

SEQ ID NO: 284 - DNA, 23 bp, Homo sapiens
gatgtggtggataacagcaaggg

SEQ ID NO: 285 - DNA, 23 bp, Homo sapiens
aagatggcgaatattgacaaggg

SEQ ID NO: 286 - DNA, 23 bp, Homo sapiens
agatccgaacaaaccatcagcgg

SEQ ID NO: 287 - DNA, 23 bp, Homo sapiens
taagggtgagtagtaacaggagg

SEQ ID NO: 288 - DNA, 23 bp, Homo sapiens
tctaatctctgtaagccaagtgg

SEQ ID NO: 289 - DNA, 23 bp, Homo sapiens
gcatcaatagctaattctagggg

SEQ ID NO: 290 - DNA, 23 bp, Homo sapiens
tacacctgaaggtaaatggatgg

SEQ ID NO: 291 - DNA, 23 bp, Homo sapiens
tcttcagctatgaccagacgtgg

SEQ ID NO: 292 - DNA, 23 bp, Homo sapiens
ataacagccagagtaataccagg

SEQ ID NO: 293 - DNA, 23 bp, Homo sapiens
agtgagagctagaagccgtgtgg

SEQ ID NO: 294 - DNA, 23 bp, Homo sapiens
cattgtgtaaaacaatatagcgg

SEQ ID NO: 295 - DNA, 23 bp, Homo sapiens
ttggttggtattgatcagagagg

SEQ ID NO: 296 - DNA, 23 bp, Homo sapiens
acaagattgaggaacaaaggtgg

SEQ ID NO: 297 - DNA, 23 bp, Homo sapiens
ttagaaccaaaagtcgatggagg

SEQ ID NO: 298 - DNA, 23 bp, Homo sapiens
atgtaatctacgaatcattgggg

SEQ ID NO: 299 - DNA, 23 bp, Homo sapiens
caatttgtcaaagctgactgggg

SEQ ID NO: 300 - DNA, 23 bp, Homo sapiens
aggggttaaagattactgagagg

SEQ ID NO: 301 - DNA, 23 bp, Homo sapiens
tctatgatgaaggaaatggtggg

SEQ ID NO: 302 - DNA, 23 bp, Homo sapiens
taggatgtgatatctggcagtgg

SEQ ID NO: 303 - DNA, 23 bp, Homo sapiens
agaaacttaacagaaaaaggagg

SEQ ID NO: 304 - DNA, 23 bp, Homo sapiens
ccagatctgagtcctgtaggggg

SEQ ID NO: 305 - DNA, 23 bp, Homo sapiens
cttaggagtaattaccacggtgg

SEQ ID NO: 306 - DNA, 23 bp, Homo sapiens
ccaaagttgggcaaagactgggg

SEQ ID NO: 307 - DNA, 23 bp, Homo sapiens
acttccgtatttggtgaacaggg

SEQ ID NO: 308 - DNA, 23 bp, Homo sapiens
tacaggccatgggaatgatgggg

SEQ ID NO: 309 - DNA, 23 bp, Homo sapiens
tgggagagattacactcccgtgg

SEQ ID NO: 310 - DNA, 23 bp, Homo sapiens
attagtcatggagtcctaagggg

SEQ ID NO: 311 - DNA, 23 bp, Homo sapiens
agctaagccactgattactgtgg

SEQ ID NO: 312 - DNA, 23 bp, Homo sapiens
gataatagctgaacattacgtgg

SEQ ID NO: 313 - DNA, 23 bp, Homo sapiens
gcttcatcagaaacctagtgtgg

SEQ ID NO: 314 - DNA, 23 bp, Homo sapiens
tgaagactttcgtctcagagagg

SEQ ID NO: 315 - DNA, 23 bp, Homo sapiens
gaaaagcttaaagctaacggagg

SEQ ID NO: 316 - DNA, 23 bp, Homo sapiens
agccgttagagaaagtgttgtgg

SEQ ID NO: 317 - DNA, 23 bp, Homo sapiens
gagggtgaggaaactcacacggg

SEQ ID NO: 318 - DNA, 23 bp, Homo sapiens
ggtaagagttagttacacatggg

SEQ ID NO: 319 - DNA, 23 bp, Homo sapiens
aattacggtgctacaagacgagg

SEQ ID NO: 320 - DNA, 23 bp, Homo sapiens
gagcttccactaggccagagggg

SEQ ID NO: 321 - DNA, 23 bp, Homo sapiens
cctagaattgacgttacaggagg

SEQ ID NO: 322 - DNA, 23 bp, Homo sapiens
atggaatgcagtgttcagagtgg

SEQ ID NO: 323 - DNA, 23 bp, Homo sapiens
ggaacaacaggaaggattagggg

SEQ ID NO: 324 - DNA, 23 bp, Homo sapiens
aggatgacaactggaaacgtagg

SEQ ID NO: 325 - DNA, 23 bp, Homo sapiens
tttccacaaagttttcccagtgg

SEQ ID NO: 326 - DNA, 23 bp, Homo sapiens
tggttgtgtcaacgaagaggagg

SEQ ID NO: 327 - DNA, 23 bp, Homo sapiens
atgttggagcaatagccacaggg

SEQ ID NO: 328 - DNA, 23 bp, Homo sapiens
gctagaagtagaaaagcaggagg

SEQ ID NO: 329 - DNA, 23 bp, Homo sapiens
aaacgaatattggcgccatgagg

SEQ ID NO: 330 - DNA, 23 bp, Homo sapiens
tgatatgctaaataaaagggggg

SEQ ID NO: 331 - DNA, 23 bp, Homo sapiens
aaataaggtgggatccaaggtgg

SEQ ID NO: 332 - DNA, 23 bp, Homo sapiens
tacggtgctacaagacgaggagg

SEQ ID NO: 333 - DNA, 23 bp, Homo sapiens
attgcggtgcctaaagctcgagg

SEQ ID NO: 334 - DNA, 23 bp, Homo sapiens
aagtttcctccctagaggagggg

SEQ ID NO: 335 - DNA, 23 bp, Homo sapiens
catccaaatacccctcatagggg

SEQ ID NO: 336 - DNA, 23 bp, Homo sapiens
gtccagaacatgttacaacaggg

SEQ ID NO: 337 - DNA, 23 bp, Homo sapiens
ccatgaaatgcacacctgggtgg

SEQ ID NO: 338 - DNA, 23 bp, Homo sapiens
gccaattatctaattctcagggg

SEQ ID NO: 339 - DNA, 23 bp, Homo sapiens
ctattagttagacttccttgggg

SEQ ID NO: 340 - DNA, 23 bp, Homo sapiens
ctggaaagccattcacctcgagg

SEQ ID NO: 341 - DNA, 23 bp, Homo sapiens
atatgcaaatcagtatggagtgg

SEQ ID NO: 342 - DNA, 23 bp, Homo sapiens
atacagtactaaacagcctgagg

SEQ ID NO: 343 - DNA, 23 bp, Homo sapiens
gagtaagtatattcattgtgggg

SEQ ID NO: 344 - DNA, 23 bp, Homo sapiens
gctcaatctactaagtaaccagg

SEQ ID NO: 345 - DNA, 23 bp, Homo sapiens
agcttgttgagagccacacacgg

SEQ ID NO: 346 - DNA, 23 bp, Homo sapiens
acatgggcatatcaacaatgagg

SEQ ID NO: 347 - DNA, 23 bp, Homo sapiens
tcaaaagcaggatcttacaaagg

SEQ ID NO: 348 - DNA, 23 bp, Homo sapiens
cctcaattagaaaaatgcagagg

SEQ ID NO: 349 - DNA, 23 bp, Homo sapiens
ggtgtgtacacctaatccaaagg

SEQ ID NO: 350 - DNA, 23 bp, Homo sapiens
ataaacatgtggtagtggtgagg

SEQ ID NO: 351 - DNA, 23 bp, Homo sapiens
aatgcttgtaatggatgtgacgg

SEQ ID NO: 352 - DNA, 23 bp, Homo sapiens
caaaacccatcaactataggcgg

SEQ ID NO: 353 - DNA, 23 bp, Homo sapiens
gaaaaaagtactcacaagggagg

SEQ ID NO: 354 - DNA, 23 bp, Homo sapiens
gtttatgctctcccgcacaatgg

SEQ ID NO: 355 - DNA, 23 bp, Homo sapiens
tggattggacagacgctaggtgg

SEQ ID NO: 356 - DNA, 23 bp, Homo sapiens
agattgttacggaagttttgggg

SEQ ID NO: 357 - DNA, 23 bp, Homo sapiens
gtatgacaagagacatccatggg

SEQ ID NO: 358 - DNA, 23 bp, Homo sapiens
gtgacaagcttagcgaacagtgg

SEQ ID NO: 359 - DNA, 23 bp, Homo sapiens
tagtacttaagtagtatgggtgg

SEQ ID NO: 360 - DNA, 23 bp, Homo sapiens
tttctcttacacattctatgggg

SEQ ID NO: 361 - DNA, 23 bp, Homo sapiens
cctttactgaaatcagacaaggg

SEQ ID NO: 362 - DNA, 23 bp, Homo sapiens
cctaccaagagaagaagaggggg

SEQ ID NO: 363 - DNA, 23 bp, Homo sapiens
gtgatatccagcatagatggggg

SEQ ID NO: 364 - DNA, 23 bp, Homo sapiens
taaataaatatactaaccagtgg

SEQ ID NO: 365 - DNA, 23 bp, Homo sapiens
tggtgctttagacattacccagg

SEQ ID NO: 366 - DNA, 23 bp, Homo sapiens
tcaagcaacactcacacgggtgg

SEQ ID NO: 367 - DNA, 23 bp, Homo sapiens
agtgcatactctagtagtgacgg

SEQ ID NO: 368 - DNA, 23 bp, Homo sapiens
acgaaggagaaaattctttgggg

SEQ ID NO: 369 - DNA, 23 bp, Homo sapiens
agaactggtaaacaactgcaggg

SEQ ID NO: 370 - DNA, 23 bp, Homo sapiens
acaaaccaggaaaaatgagaggg

SEQ ID NO: 371 - DNA, 23 bp, Homo sapiens
ttcaggtagatgatgacaggggg

SEQ ID NO: 372 - DNA, 23 bp, Homo sapiens
agtcttagccaaaagcagagtgg

SEQ ID NO: 373 - DNA, 23 bp, Homo sapiens
tcacttttagtgttcccctgagg

SEQ ID NO: 374 - DNA, 23 bp, Homo sapiens
tgattacattagcttcagagtgg

SEQ ID NO: 375 - DNA, 23 bp, Homo sapiens
ggaaaaagattccagaaaggggg

SEQ ID NO: 376 - DNA, 23 bp, Homo sapiens
acgggaagctcagacagctgggg

SEQ ID NO: 377 - DNA, 23 bp, Homo sapiens
gtgcctatcctaataagcagggg

SEQ ID NO: 378 - DNA, 23 bp, Homo sapiens
tactaagtgaatggaaatggagg

SEQ ID NO: 379 - DNA, 23 bp, Homo sapiens
tccattatttttgaccactgcgg

SEQ ID NO: 380 - DNA, 23 bp, Homo sapiens
gcaatatgggaggaaattagggg

SEQ ID NO: 381 - DNA, 23 bp, Homo sapiens
aattttaaaaagtttcacaaggg

SEQ ID NO: 382 - DNA, 23 bp, Homo sapiens
aatccttctgatacagaaggtgg

SEQ ID NO: 383 - DNA, 23 bp, Homo sapiens
gaataaatactgttattcagagg

SEQ ID NO: 384 - DNA, 23 bp, Homo sapiens
gtagatatatacataaatggggg

SEQ ID NO: 385 - DNA, 23 bp, Homo sapiens
taattatgtgtcaacacctgagg

SEQ ID NO: 386 - DNA, 23 bp, Homo sapiens
cactgaagactataaaactgagg

SEQ ID NO: 387 - DNA, 23 bp, Homo sapiens
cataattctcaaaaagagggggg

SEQ ID NO: 388 - DNA, 23 bp, Homo sapiens
cattgatgatgccttgagtgtgg

SEQ ID NO: 389 - DNA, 23 bp, Homo sapiens
tgggatttgaagacttcacgtgg

SEQ ID NO: 390 - DNA, 23 bp, Homo sapiens
acaagggcagtgataaggagagg

SEQ ID NO: 391 - DNA, 23 bp, Homo sapiens
actatggtaacaagagagtgagg

SEQ ID NO: 392 - DNA, 23 bp, Homo sapiens
atgaattcaacacacccggaggg

SEQ ID NO: 393 - DNA, 23 bp, Homo sapiens
attctcaagtgcagtcaccaggg

SEQ ID NO: 394 - DNA, 23 bp, Homo sapiens
atttatggcataattaccagagg

SEQ ID NO: 395 - DNA, 23 bp, Homo sapiens
gcagtatgatgaagtgcaggggg

SEQ ID NO: 396 - DNA, 23 bp, Homo sapiens
tgtctattaagcatcaacctagg

SEQ ID NO: 397 - DNA, 23 bp, Homo sapiens
tatagctgtatcatttactgagg

SEQ ID NO: 398 - DNA, 23 bp, Homo sapiens
gttacatttaaccttcaccatgg

SEQ ID NO: 399 - DNA, 23 bp, Homo sapiens
agttttctaccatagacaagggg

SEQ ID NO: 400 - DNA, 23 bp, Homo sapiens
ctgacagcccattagagacgggg

SEQ ID NO: 401 - DNA, 23 bp, Homo sapiens
aatggcaccattatccacccagg

SEQ ID NO: 402 - DNA, 23 bp, Homo sapiens
aattctttcccagaacaatgtgg

SEQ ID NO: 403 - DNA, 23 bp, Homo sapiens
agcagtatgatgaagtgcagggg

SEQ ID NO: 404 - DNA, 23 bp, Homo sapiens
taaactgcagacacttccacggg

SEQ ID NO: 405 - DNA, 23 bp, Homo sapiens
taaaaaatgagagataggtgggg

SEQ ID NO: 406 - DNA, 23 bp, Homo sapiens
acacttgagaagaaactagacgg

SEQ ID NO: 407 - DNA, 23 bp, Homo sapiens
gatggagtcaacatttccaaagg

SEQ ID NO: 408 - DNA, 23 bp, Homo sapiens
ataaatatccttgatgcctgtgg

SEQ ID NO: 409 - DNA, 23 bp, Homo sapiens
gtggaaaacagaagtcaatgagg

SEQ ID NO: 410 - DNA, 23 bp, Homo sapiens
tgtgtgtgtataggtctcatggg

SEQ ID NO: 411 - DNA, 23 bp, Homo sapiens
actgaacaattggtatactgagg

SEQ ID NO: 412 - DNA, 23 bp, Homo sapiens
atacagatatagcacataccagg

SEQ ID NO: 413 - DNA, 23 bp, Homo sapiens
atgcgaagccactacccatgggg

SEQ ID NO: 414 - DNA, 23 bp, Homo sapiens
tcatttgcatggctctacgtggg

SEQ ID NO: 415 - DNA, 23 bp, Homo sapiens
gtataagacagggtacctgaggg

SEQ ID NO: 416 - DNA, 23 bp, Homo sapiens
gggctcacattgtagaaatgtgg

SEQ ID NO: 417 - DNA, 23 bp, Homo sapiens
atgtggttgtgtcaacgaagagg

SEQ ID NO: 418 - DNA, 23 bp, Homo sapiens
ctgacaagtttcctccctagagg

SEQ ID NO: 419 - DNA, 23 bp, Homo sapiens
gtgaaaagtgatgtgagacaagg

SEQ ID NO: 420 - DNA, 23 bp, Homo sapiens
gtaattttggtatatatacgtgg

SEQ ID NO: 421 - DNA, 23 bp, Homo sapiens
gtgctcggcatgaatgcagtggg

SEQ ID NO: 422 - DNA, 23 bp, Homo sapiens
gtctgctacatgaggaacagcgg

SEQ ID NO: 423 - DNA, 23 bp, Homo sapiens
aaatcaacaccgataatacaggg

SEQ ID NO: 424 - DNA, 23 bp, Homo sapiens
tcctgcctgatacaaccagaagg

SEQ ID NO: 425 - DNA, 23 bp, Homo sapiens
tgactcatcacatcctggagagg

SEQ ID NO: 426 - DNA, 23 bp, Homo sapiens
cagacaaatggtcaaacacaggg

SEQ ID NO: 427 - DNA, 23 bp, Homo sapiens
tgaacaaaaagctaagaactggg

SEQ ID NO: 428 - DNA, 23 bp, Homo sapiens
tatttcacagtagatatccaggg

SEQ ID NO: 429 - DNA, 23 bp, Homo sapiens
tgtggtctcacatacaaaccagg

SEQ ID NO: 430 - DNA, 23 bp, Homo sapiens
aggtcatgtgtaagtcacaaagg

SEQ ID NO: 431 - DNA, 23 bp, Homo sapiens
aagcaactagcaatagacaaagg

SEQ ID NO: 432 - DNA, 23 bp, Homo sapiens
aaaggctgccagagtaacacggg

SEQ ID NO: 433 - DNA, 23 bp, Homo sapiens
acatgaccttacatacatcacgg

SEQ ID NO: 434 - DNA, 23 bp, Homo sapiens
attgcctctcatatttacagagg

SEQ ID NO: 435 - DNA, 23 bp, Homo sapiens
ttggcattgtataaacatcaggg

SEQ ID NO: 436 - DNA, 23 bp, Homo sapiens
ggcctttgaagaaatcacgctgg

SEQ ID NO: 437 - DNA, 23 bp, Homo sapiens
gtgtttcaaacactactgatggg

SEQ ID NO: 438 - DNA, 23 bp, Homo sapiens
cttgaagagataaaaacaagcgg

SEQ ID NO: 439 - DNA, 23 bp, Homo sapiens
ccttgaagcatacattaccgtgg

SEQ ID NO: 440 - DNA, 23 bp, Homo sapiens
tcttaattaatgttactgagagg

SEQ ID NO: 441 - DNA, 23 bp, Homo sapiens
gggctggcttgaaaatcaggagg

SEQ ID NO: 442 - DNA, 23 bp, Homo sapiens
tcacaaaaaacgttgtgtagggg

SEQ ID NO: 443 - DNA, 23 bp, Homo sapiens
aaaatactcatgaagtaccaagg

SEQ ID NO: 444 - DNA, 23 bp, Homo sapiens
atatgtgagtagaatacactggg

SEQ ID NO: 445 - DNA, 23 bp, Homo sapiens
atcctccagattcataacgaagg

SEQ ID NO: 446 - DNA, 23 bp, Homo sapiens
atttagacaaccacactgagagg

SEQ ID NO: 447 - DNA, 23 bp, Homo sapiens
ataattctcccatctaagtgtgg

SEQ ID NO: 448 - DNA, 23 bp, Homo sapiens
attagatgaagaaaatcacatgg

SEQ ID NO: 449 - DNA, 23 bp, Homo sapiens
acacgtgttggacgttagtgggg

SEQ ID NO: 450 - DNA, 23 bp, Homo sapiens
aggtacctaatagcaagaccagg

SEQ ID NO: 451 - DNA, 23 bp, Homo sapiens
agtaagaattgagatatgtgcgg

SEQ ID NO: 452 - DNA, 23 bp, Homo sapiens
gaccaactaaaatattgtcgtgg

SEQ ID NO: 453 - DNA, 23 bp, Homo sapiens
aatacattaaaaccagacaaagg

SEQ ID NO: 454 - DNA, 23 bp, Homo sapiens
atctggcctaggctacatgtagg

SEQ ID NO: 455 - DNA, 23 bp, Homo sapiens
aaatcagtgatacatatcgatgg

SEQ ID NO: 456 - DNA, 23 bp, Homo sapiens
tctgaagagcaacacctgagagg

SEQ ID NO: 457 - DNA, 23 bp, Homo sapiens
gtaaacgacatacaaacttgagg

SEQ ID NO: 458 - DNA, 23 bp, Homo sapiens
ttaaaatctagagtattacaggg

SEQ ID NO: 459 - DNA, 23 bp, Homo sapiens
gaaagaatttgaataccaagagg

SEQ ID NO: 460 - DNA, 23 bp, Homo sapiens
attgagaaaaagttgtcgtgggg

SEQ ID NO: 461 - DNA, 23 bp, Homo sapiens
gttatcaaagtgttaaacacagg

SEQ ID NO: 462 - DNA, 23 bp, Homo sapiens
gttgtatgattggatgtactggg

SEQ ID NO: 463 - DNA, 23 bp, Homo sapiens
atggctgcatgataattagtggg

SEQ ID NO: 464 - DNA, 23 bp, Homo sapiens
atacacgatgatctagtacaagg

SEQ ID NO: 465 - DNA, 23 bp, Homo sapiens
gcagtactctttgtagacaaggg

SEQ ID NO: 466 - DNA, 23 bp, Homo sapiens
tgtgggagacatcaccacaatgg

SEQ ID NO: 467 - DNA, 23 bp, Homo sapiens
cataactagagaggaaatggagg

SEQ ID NO: 468 - DNA, 23 bp, Homo sapiens
gcagctactctagctcatgtggg

SEQ ID NO: 469 - DNA, 23 bp, Homo sapiens
ctaaaaagtacaagactgtgagg

SEQ ID NO: 470 - DNA, 23 bp, Homo sapiens
tgtagcttagtctcacagcaagg

SEQ ID NO: 471 - DNA, 23 bp, Homo sapiens
agtggtgattccaatcattgggg

SEQ ID NO: 472 - DNA, 23 bp, Homo sapiens
agacacctaatgctaaaagtggg

SEQ ID NO: 473 - DNA, 23 bp, Homo sapiens
tgcacaacaaaagcttaacatgg

SEQ ID NO: 474 - DNA, 23 bp, Homo sapiens
gctagtggggaaggaccgggtgg

SEQ ID NO: 475 - DNA, 23 bp, Homo sapiens
atcatcaccaaacctaatcgagg

SEQ ID NO: 476 - DNA, 23 bp, Homo sapiens
tcctatgaatgacatacctgcgg

SEQ ID NO: 477 - DNA, 23 bp, Homo sapiens
atttcacctaaattacacaaagg

SEQ ID NO: 478 - DNA, 23 bp, Homo sapiens
tgtgatatccagcatagatgggg

SEQ ID NO: 479 - DNA, 23 bp, Homo sapiens
catccataatcagagaagggagg

SEQ ID NO: 480 - DNA, 23 bp, Homo sapiens
gatccaaagaccatttcccaggg

SEQ ID NO: 481 - DNA, 23 bp, Homo sapiens
ccacatgtaaaaatctccagagg

SEQ ID NO: 482 - DNA, 23 bp, Homo sapiens
ataatgacagagtgaaagtgagg

SEQ ID NO: 483 - DNA, 23 bp, Homo sapiens
gggttctaaaaatcgtacgcagg

SEQ ID NO: 484 - DNA, 23 bp, Homo sapiens
tcatataataccataagctgagg

SEQ ID NO: 485 - DNA, 23 bp, Homo sapiens
agaaagatacagtctaggggtgg

SEQ ID NO: 486 - DNA, 23 bp, Homo sapiens
gaaaatactcagtaagactgagg

SEQ ID NO: 487 - DNA, 23 bp, Homo sapiens
tagattgaaagcattaacaatgg

SEQ ID NO: 488 - DNA, 23 bp, Homo sapiens
caaccagcaaaataaccctaggg

SEQ ID NO: 489 - DNA, 23 bp, Homo sapiens
tttgaaggttgacaactaagggg

SEQ ID NO: 490 - DNA, 23 bp, Homo sapiens
gggtggacaggtaaagaacaggg

SEQ ID NO: 491 - DNA, 23 bp, Homo sapiens
tgaaagcatttaaaaactggggg

SEQ ID NO: 492 - DNA, 23 bp, Homo sapiens
ctgaaaagaggaaataatcgtgg

SEQ ID NO: 493 - DNA, 23 bp, Homo sapiens
agtaattctctgtaggcaagcgg

SEQ ID NO: 494 - DNA, 23 bp, Homo sapiens
gcctttcgcatagacatctgagg

SEQ ID NO: 495 - DNA, 23 bp, Homo sapiens
tgtttgcacaatctaccagatgg

SEQ ID NO: 496 - DNA, 23 bp, Homo sapiens
actgtgtgtcccgaagagatggg

SEQ ID NO: 497 - DNA, 23 bp, Homo sapiens
gatttataatgattaccaagtgg

SEQ ID NO: 498 - DNA, 23 bp, Homo sapiens
ttgcctttgatgaaaatacgtgg

SEQ ID NO: 499 - DNA, 23 bp, Homo sapiens
aaccacactgagaggaaaggagg

SEQ ID NO: 500 - DNA, 23 bp, Homo sapiens
ggttccaaaaaaaagcagaacgg

SEQ ID NO: 501 - DNA, 23 bp, Homo sapiens
ttataatccactgattgtagggg

SEQ ID NO: 502 - DNA, 23 bp, Homo sapiens
ggagctgcagcttttcaaagggg

SEQ ID NO: 503 - DNA, 23 bp, Homo sapiens
tctgctggatgaaagaacacagg

SEQ ID NO: 504 - DNA, 23 bp, Homo sapiens
gattaaaaatcaccaaaacaagg

SEQ ID NO: 505 - DNA, 23 bp, Homo sapiens
aaccatgcttgacgctaggatgg

SEQ ID NO: 506 - DNA, 23 bp, Homo sapiens
agtctatatcaaaatataggggg

SEQ ID NO: 507 - DNA, 23 bp, Homo sapiens
tatgtttctaaaaacaaccgtgg

SEQ ID NO: 508 - DNA, 23 bp, Homo sapiens
ttaaaataaccattatcaccagg

SEQ ID NO: 509 - DNA, 23 bp, Homo sapiens
aatgtgacttatgagactgaagg

SEQ ID NO: 510 - DNA, 23 bp, Homo sapiens
attcacaattgaccatttcgggg

SEQ ID NO: 511 - DNA, 23 bp, Homo sapiens
gtagaaatggaataaacatgtgg

SEQ ID NO: 512 - DNA, 23 bp, Homo sapiens
tgttttgatagcaatacctgagg

SEQ ID NO: 513 - DNA, 23 bp, Homo sapiens
ttagtgtactgagaaatgaaagg

SEQ ID NO: 514 - DNA, 23 bp, Homo sapiens
cagtgtccctctatgctgtgagg

SEQ ID NO: 515 - DNA, 23 bp, Homo sapiens
ctttacaaaatgataaacccagg

SEQ ID NO: 516 - DNA, 23 bp, Homo sapiens
tttccctaaactgaatgaggagg

SEQ ID NO: 517 - DNA, 23 bp, Homo sapiens
aagtaaatcagtccatcacaagg

SEQ ID NO: 518 - DNA, 23 bp, Homo sapiens
ataaggttgtgcttccagcatgg

SEQ ID NO: 519 - DNA, 23 bp, Homo sapiens
gatagctaggctaattccaaggg

SEQ ID NO: 520 - DNA, 23 bp, Homo sapiens
gcacattcacataactagagagg

SEQ ID NO: 521 - DNA, 23 bp, Homo sapiens
gagaagccaaaatcatagcacgg

SEQ ID NO: 522 - DNA, 23 bp, Homo sapiens
atggcaggaagatttattggggg

SEQ ID NO: 523 - DNA, 23 bp, Homo sapiens
ctccaagctaaaaattcatgggg

SEQ ID NO: 524 - DNA, 23 bp, Homo sapiens
ttctaaacacgtattctgtgagg

SEQ ID NO: 525 - DNA, 23 bp, Homo sapiens
gttgggttaagcagtgacatggg

SEQ ID NO: 526 - DNA, 23 bp, Homo sapiens
gccatctatttaataacacaagg

SEQ ID NO: 527 - DNA, 23 bp, Homo sapiens
agcctgaaaatatagccagaggg

SEQ ID NO: 528 - DNA, 23 bp, Homo sapiens
agtacctaaaagtgaacaggagg

SEQ ID NO: 529 - DNA, 23 bp, Homo sapiens
tgaccatgcaaactttcaggagg

SEQ ID NO: 530 - DNA, 23 bp, Homo sapiens
gagagaataaaataaaacgttgg

SEQ ID NO: 531 - DNA, 23 bp, Homo sapiens
ttttcaaatttaagccagagggg

SEQ ID NO: 532 - DNA, 23 bp, Homo sapiens
gggaagcttattgaagacagtgg

SEQ ID NO: 533 - DNA, 23 bp, Homo sapiens
ccagtctcctccatagcctgagg

SEQ ID NO: 534 - DNA, 23 bp, Homo sapiens
aaaaaaatacaatggtaaggggg

SEQ ID NO: 535 - DNA, 23 bp, Homo sapiens
attaggctaatactggtctgtgg

SEQ ID NO: 536 - DNA, 23 bp, Homo sapiens
ttcctcactaatgggaactgggg

SEQ ID NO: 537 - DNA, 23 bp, Homo sapiens
tgaacctctgtgataacacttgg

SEQ ID NO: 538 - DNA, 23 bp, Homo sapiens
ttatgaggcaaataatgaggagg

SEQ ID NO: 539 - DNA, 23 bp, Homo sapiens
cagacagtgatgtttcatgtggg

SEQ ID NO: 540 - DNA, 23 bp, Homo sapiens
ggtattacctgtaaaaaccaggg

SEQ ID NO: 541 - DNA, 23 bp, Homo sapiens
gcatatggtatgtgctagcgtgg

SEQ ID NO: 542 - DNA, 23 bp, Homo sapiens
tatcttcacatgctgtcatgggg

SEQ ID NO: 543 - DNA, 23 bp, Homo sapiens
aaaatgttaagtactgagggtgg

SEQ ID NO: 544 - DNA, 23 bp, Homo sapiens
agtttaaagtgtcttctcagtgg

SEQ ID NO: 545 - DNA, 23 bp, Homo sapiens
aatgctacagtagtacagctggg

SEQ ID NO: 546 - DNA, 23 bp, Homo sapiens
tgagagctagaagccgtgtgggg

SEQ ID NO: 547 - DNA, 23 bp, Homo sapiens
atagtacaaagatgttcaggagg

SEQ ID NO: 548 - DNA, 23 bp, Homo sapiens
taaacccacgaagagagaagagg

SEQ ID NO: 549 - DNA, 23 bp, Homo sapiens
aacccaaactgacatgtaggagg

SEQ ID NO: 550 - DNA, 23 bp, Homo sapiens
cacgcacaagagatgtggaaagg

SEQ ID NO: 551 - DNA, 23 bp, Homo sapiens
tcacaatgggatgtacacttggg

SEQ ID NO: 552 - DNA, 23 bp, Homo sapiens
gcagtgagaagaatatagagagg

SEQ ID NO: 553 - DNA, 23 bp, Homo sapiens
tttggttccaggtaataaagtgg

SEQ ID NO: 554 - DNA, 23 bp, Homo sapiens
actaacagactaatggaaggagg

SEQ ID NO: 555 - DNA, 23 bp, Homo sapiens
tttagcacgcacaagagatgtgg

SEQ ID NO: 556 - DNA, 23 bp, Homo sapiens
ctactgtgtctgatatgtggagg

SEQ ID NO: 557 - DNA, 23 bp, Homo sapiens
tgaaaatagaaagtcccgcatgg

SEQ ID NO: 558 - DNA, 23 bp, Homo sapiens
ccattattacaacactctagagg

SEQ ID NO: 559 - DNA, 23 bp, Homo sapiens
atacacaagaatcttggcaaggg

SEQ ID NO: 560 - DNA, 23 bp, Homo sapiens
ataacaataattaatactggtgg

SEQ ID NO: 561 - DNA, 23 bp, Homo sapiens
tctgttttttccccaaattgcgg

SEQ ID NO: 562 - DNA, 23 bp, Homo sapiens
ggttgattgtaaatgtcccaagg

SEQ ID NO: 563 - DNA, 23 bp, Homo sapiens
gtggtcagcttacaatgaggagg

SEQ ID NO: 564 - DNA, 23 bp, Homo sapiens
atacaatagactgcaaccaaagg

SEQ ID NO: 565 - DNA, 23 bp, Homo sapiens
gtaaaactaacatttacctgtgg

SEQ ID NO: 566 - DNA, 23 bp, Homo sapiens
taattgtttcagtagaacagtgg

SEQ ID NO: 567 - DNA, 23 bp, Homo sapiens
gcttggcctcattagctctgggg

SEQ ID NO: 568 - DNA, 23 bp, Homo sapiens
atcgtgtgtctatatttcagagg

SEQ ID NO: 569 - DNA, 23 bp, Homo sapiens
aatatattacaacttcccgtggg

SEQ ID NO: 570 - DNA, 23 bp, Homo sapiens
acgcacaaacataaaatcagagg

SEQ ID NO: 571 - DNA, 23 bp, Homo sapiens
aatgcatgtacaaactaaggagg

SEQ ID NO: 572 - DNA, 23 bp, Homo sapiens
tatttgaactccatgccagaggg

SEQ ID NO: 573 - DNA, 23 bp, Homo sapiens
ctgaaaacaacgacgaagtgggg

SEQ ID NO: 574 - DNA, 23 bp, Homo sapiens
ttatatgtaagtctcttcggtgg

SEQ ID NO: 575 - DNA, 23 bp, Homo sapiens
ctgtgattttgtgaacacaatgg

SEQ ID NO: 576 - DNA, 23 bp, Homo sapiens
gattgttctgataacccaagagg

SEQ ID NO: 577 - DNA, 23 bp, Homo sapiens
gtggcacccatcttaatgagagg

SEQ ID NO: 578 - DNA, 23 bp, Homo sapiens
taagttcaggagttttaacgtgg

SEQ ID NO: 579 - DNA, 23 bp, Homo sapiens
cagatatattcctaggagggtgg

SEQ ID NO: 580 - DNA, 23 bp, Homo sapiens
acacagtttggggattccagtgg

SEQ ID NO: 581 - DNA, 23 bp, Homo sapiens
ccagccagttctctagactgagg

SEQ ID NO: 582 - DNA, 23 bp, Homo sapiens
tgtctatgaaaaggagtaggagg

SEQ ID NO: 583 - DNA, 23 bp, Homo sapiens
ccaaaacataaacattcacaggg

SEQ ID NO: 584 - DNA, 23 bp, Homo sapiens
tagctataagtgatttaacaggg

SEQ ID NO: 585 - DNA, 23 bp, Homo sapiens
ataaggtatttattaccactggg

SEQ ID NO: 586 - DNA, 23 bp, Homo sapiens
gtttctcaaagaaagaccccagg

SEQ ID NO: 587 - DNA, 23 bp, Homo sapiens
tatgaaatactttaacacccagg

SEQ ID NO: 588 - DNA, 23 bp, Homo sapiens
agagattgattggttgacagtgg

SEQ ID NO: 589 - DNA, 23 bp, Homo sapiens
acctacataaaaataaggggagg

SEQ ID NO: 590 - DNA, 23 bp, Homo sapiens
attacacacaaaatagtggacgg

SEQ ID NO: 591 - DNA, 23 bp, Homo sapiens
atgctcatctctaggtatggggg

SEQ ID NO: 592 - DNA, 23 bp, Homo sapiens
ccattaccacaatagtccagtgg

SEQ ID NO: 593 - DNA, 23 bp, Homo sapiens
tgtaaaggattaggtaactgagg

SEQ ID NO: 594 - DNA, 23 bp, Homo sapiens
gagaaagtgtggaaagcactggg

SEQ ID NO: 595 - DNA, 23 bp, Homo sapiens
accaacttgagagagaaggcggg

SEQ ID NO: 596 - DNA, 23 bp, Homo sapiens
ttaaattaagacctctggggagg

SEQ ID NO: 597 - DNA, 23 bp, Homo sapiens
acagttaactagaactgctgggg

SEQ ID NO: 598 - DNA, 23 bp, Homo sapiens
agagccatgcaaatgagagtggg

SEQ ID NO: 599 - DNA, 23 bp, Homo sapiens
taactcttaaccattttgagggg

SEQ ID NO: 600 - DNA, 23 bp, Homo sapiens
agggaatatgaaacccccatagg

SEQ ID NO: 601 - DNA, 23 bp, Homo sapiens
gcaaaaactcccaaatggtgagg

SEQ ID NO: 602 - DNA, 23 bp, Homo sapiens
acatgttgtggaggaactgatgg

SEQ ID NO: 603 - DNA, 23 bp, Homo sapiens
aattacatcaacaaaaatggagg

SEQ ID NO: 604 - DNA, 23 bp, Homo sapiens
taaagcacttcagaagacacagg

SEQ ID NO: 605 - DNA, 23 bp, Homo sapiens
cttagcataaccataacctaggg

SEQ ID NO: 606 - DNA, 23 bp, Homo sapiens
gaaatgtctaaaaattctggagg

SEQ ID NO: 607 - DNA, 23 bp, Homo sapiens
gggcattgcaccttgcacaaagg

SEQ ID NO: 608 - DNA, 23 bp, Homo sapiens
gaaagaattgagacattactggg

SEQ ID NO: 609 - DNA, 23 bp, Homo sapiens
gggtatggagtggatcaacatgg

SEQ ID NO: 610 - DNA, 23 bp, Homo sapiens
catcttcatagactttatggagg

SEQ ID NO: 611 - DNA, 23 bp, Homo sapiens
tcaaaagctagaaattgatgagg

SEQ ID NO: 612 - DNA, 23 bp, Homo sapiens
tcctatatactagagccagaagg

SEQ ID NO: 613 - DNA, 23 bp, Homo sapiens
tctagtggagcagtaactgaggg

SEQ ID NO: 614 - DNA, 23 bp, Homo sapiens
atatatttcggagacccagtagg

SEQ ID NO: 615 - DNA, 23 bp, Homo sapiens
tatccctgagagtatatgagtgg

SEQ ID NO: 616 - DNA, 23 bp, Homo sapiens
gctacaataattgttctgagagg

SEQ ID NO: 617 - DNA, 23 bp, Homo sapiens
cctttaaatgagcacaactgggg

SEQ ID NO: 618 - DNA, 23 bp, Homo sapiens
cattgagcacactctacaagggg

SEQ ID NO: 619 - DNA, 23 bp, Homo sapiens
gcataactctctcagtccaaagg

SEQ ID NO: 620 - DNA, 23 bp, Homo sapiens
tctagtcctcagcatcatcaggg

SEQ ID NO: 621 - DNA, 23 bp, Homo sapiens
aagattaaacatgaacctgtggg

SEQ ID NO: 622 - DNA, 23 bp, Homo sapiens
aattatagggataaacacccagg

SEQ ID NO: 623 - DNA, 23 bp, Homo sapiens
ttattccaatcctagagtggagg

SEQ ID NO: 624 - DNA, 23 bp, Homo sapiens
acgtaatgatgtcaaccagtagg

SEQ ID NO: 625 - DNA, 23 bp, Homo sapiens
cagtgaagatgagcaacaggtgg

SEQ ID NO: 626 - DNA, 23 bp, Homo sapiens
tttctcagttggtatctctgggg

SEQ ID NO: 627 - DNA, 23 bp, Homo sapiens
tactgtataaaaataaaccaagg

SEQ ID NO: 628 - DNA, 23 bp, Homo sapiens
ttttcataaatgaattactgggg

SEQ ID NO: 629 - DNA, 23 bp, Homo sapiens
ttttttaaattatattcacaagg

SEQ ID NO: 630 - DNA, 23 bp, Homo sapiens
tgtaagccacaagtgtaatgggg

SEQ ID NO: 631 - DNA, 23 bp, Homo sapiens
atatttttcctagaaaagcgtgg

SEQ ID NO: 632 - DNA, 23 bp, Homo sapiens
gtctgataaaaccataacaaggg

SEQ ID NO: 633 - DNA, 23 bp, Homo sapiens
accctacgcataagagcaggtgg

SEQ ID NO: 634 - DNA, 23 bp, Homo sapiens
gctacatactgtaatcactcagg

SEQ ID NO: 635 - DNA, 23 bp, Homo sapiens
gataatacctacataatactggg

SEQ ID NO: 636 - DNA, 23 bp, Homo sapiens
gagagctagaagccgtgtggggg

SEQ ID NO: 637 - DNA, 23 bp, Homo sapiens
aaagcatgtatgtaattgggagg

SEQ ID NO: 638 - DNA, 23 bp, Homo sapiens
ataggcaataatattatgtgagg

SEQ ID NO: 639 - DNA, 23 bp, Homo sapiens
tattattttatagttcaaagggg

SEQ ID NO: 640 - DNA, 23 bp, Homo sapiens
cttgccatggaaaaaaatggtgg

SEQ ID NO: 641 - DNA, 23 bp, Homo sapiens
tctgtgcccttgaaggctagagg

SEQ ID NO: 642 - DNA, 23 bp, Homo sapiens
ctagttgattatgatccccaagg

SEQ ID NO: 643 - DNA, 23 bp, Homo sapiens
cgacagacaccaaatgccaatgg

SEQ ID NO: 644 - DNA, 23 bp, Homo sapiens
gatcttacttgatactaccacgg

SEQ ID NO: 645 - DNA, 23 bp, Homo sapiens
ctattggcaatgtacactgaggg

SEQ ID NO: 646 - DNA, 23 bp, Homo sapiens
tactaaactctaccacccatggg

SEQ ID NO: 647 - DNA, 23 bp, Homo sapiens
gctagaacccagctaagagaggg

SEQ ID NO: 648 - DNA, 23 bp, Homo sapiens
cccagatctgagtcctgtagggg

SEQ ID NO: 649 - DNA, 23 bp, Homo sapiens
catgtcatatgctttcccatggg

SEQ ID NO: 650 - DNA, 23 bp, Homo sapiens
aggcaaaggctacattgcgtagg

SEQ ID NO: 651 - DNA, 23 bp, Homo sapiens
gattatagaagtttacattgggg

SEQ ID NO: 652 - DNA, 23 bp, Homo sapiens
ctgatgccaggattctgtagagg

SEQ ID NO: 653 - DNA, 23 bp, Homo sapiens
actgttcgctcaagaagtaaggg

SEQ ID NO: 654 - DNA, 23 bp, Homo sapiens
aatgctatgtgagataggaaagg

SEQ ID NO: 655 - DNA, 23 bp, Homo sapiens
aaaatgtgaatagttctgagagg

SEQ ID NO: 656 - DNA, 23 bp, Homo sapiens
aataaaatagagaaaagactagg

SEQ ID NO: 657 - DNA, 23 bp, Homo sapiens
gcacttaagatgttagagggagg

SEQ ID NO: 658 - DNA, 23 bp, Homo sapiens
cgagacatagtctctgccaatgg

SEQ ID NO: 659 - DNA, 23 bp, Homo sapiens
aaatcaagcaacactcacacggg

SEQ ID NO: 660 - DNA, 23 bp, Homo sapiens
tgttaaacatcaatagagggagg

SEQ ID NO: 661 - DNA, 23 bp, Homo sapiens
caatactattaacaaccccaggg

SEQ ID NO: 662 - DNA, 23 bp, Homo sapiens
tgagcaggggaagacactatcgg

SEQ ID NO: 663 - DNA, 23 bp, Homo sapiens
gaaattctcagataatctcaggg

SEQ ID NO: 664 - DNA, 23 bp, Homo sapiens
ttagccttggaagctgtgtgagg

SEQ ID NO: 665 - DNA, 23 bp, Homo sapiens
tccgttacacgtttacaaagggg

SEQ ID NO: 666 - DNA, 23 bp, Homo sapiens
cttgccccaatgccattgtgcgg

SEQ ID NO: 667 - DNA, 23 bp, Homo sapiens
aaaatggcagtgcagagtggagg

SEQ ID NO: 668 - DNA, 23 bp, Homo sapiens
tctaccaatgccgggctccgggg

SEQ ID NO: 669 - DNA, 23 bp, Homo sapiens
aattctgctgaaattaagcaagg

SEQ ID NO: 670 - DNA, 23 bp, Homo sapiens
agtgtttagtcatatagcagagg

SEQ ID NO: 671 - DNA, 23 bp, Homo sapiens
gactagatgaccatcagagacgg

SEQ ID NO: 672 - DNA, 23 bp, Homo sapiens
gaatagaaaaagtcttacaaagg

SEQ ID NO: 673 - DNA, 23 bp, Homo sapiens
ctatttgaactccatgccagagg

SEQ ID NO: 674 - DNA, 23 bp, Homo sapiens
gtatttttttaaattttcagggg

SEQ ID NO: 675 - DNA, 23 bp, Homo sapiens
ataatacatgccaagagggtagg

SEQ ID NO: 676 - DNA, 23 bp, Homo sapiens
gtttcccacacacctctggaagg

SEQ ID NO: 677 - DNA, 23 bp, Homo sapiens
atcgtcttccaagagtgtgtggg

SEQ ID NO: 678 - DNA, 23 bp, Homo sapiens
acagttagccatccttagagtgg

SEQ ID NO: 679 - DNA, 23 bp, Homo sapiens
tccggttgccgtgaatagtgagg

SEQ ID NO: 680 - DNA, 23 bp, Homo sapiens
tccatgtcctagctcgagggcgg

SEQ ID NO: 681 - DNA, 23 bp, Homo sapiens
atcatcgctgagaaaaggcaagg

SEQ ID NO: 682 - DNA, 23 bp, Homo sapiens
gtatcttgaccctctctcagtgg

SEQ ID NO: 683 - DNA, 23 bp, Homo sapiens
ttgtcaagttaccatgcccgtgg

SEQ ID NO: 684 - DNA, 23 bp, Homo sapiens
tcatgtagcaaggagtgcagagg

SEQ ID NO: 685 - DNA, 23 bp, Homo sapiens
acatcgttagaagacagtaaagg

SEQ ID NO: 686 - DNA, 23 bp, Homo sapiens
catttatacagaagacccacggg

SEQ ID NO: 687 - DNA, 23 bp, Homo sapiens
tttgaatgtctggtattgagtgg

SEQ ID NO: 688 - DNA, 23 bp, Homo sapiens
gtaattaaaagtgctttaggggg

SEQ ID NO: 689 - DNA, 23 bp, Homo sapiens
cacagaaatagcaatatgggagg

SEQ ID NO: 690 - DNA, 23 bp, Homo sapiens
aataatgtcagagatcgtgatgg

SEQ ID NO: 691 - DNA, 23 bp, Homo sapiens
tcatgtatcagtagctttggggg

SEQ ID NO: 692 - DNA, 23 bp, Homo sapiens
tgttccataagtattgggcacgg

SEQ ID NO: 693 - DNA, 23 bp, Homo sapiens
ctgatgtttatacaatgccaagg

SEQ ID NO: 694 - DNA, 23 bp, Homo sapiens
tttgaacacatcgaggcaggtgg

SEQ ID NO: 695 - DNA, 23 bp, Homo sapiens
actgacctctaaaacttaggggg

SEQ ID NO: 696 - DNA, 23 bp, Homo sapiens
ccatttcccagggaaccagtcgg

SEQ ID NO: 697 - DNA, 23 bp, Homo sapiens
gctcttcaaagcaacatctgtgg

SEQ ID NO: 698 - DNA, 23 bp, Homo sapiens
ttaatgttagttgtttgccccgg

SEQ ID NO: 699 - DNA, 23 bp, Homo sapiens
gcctgtgcataccagatctgtgg

SEQ ID NO: 700 - DNA, 23 bp, Homo sapiens
aatgatactgggcaaactgaggg

SEQ ID NO: 701 - DNA, 23 bp, Homo sapiens
aaatatgcatgatatttgtgggg

SEQ ID NO: 702 - DNA, 23 bp, Homo sapiens
gaatgactctcagcctagggtgg

SEQ ID NO: 703 - DNA, 23 bp, Homo sapiens
tattgttaaacatcaatagaggg

SEQ ID NO: 704 - DNA, 23 bp, Homo sapiens
gggaccgaatagacaatgcaagg

SEQ ID NO: 705 - DNA, 23 bp, Homo sapiens
gtaacacgggtgacaaatgtggg

SEQ ID NO: 706 - DNA, 23 bp, Homo sapiens
gtcttctatggcaaaccatgggg

SEQ ID NO: 707 - DNA, 23 bp, Homo sapiens
ttgacacccgtagcctatggggg

SEQ ID NO: 708 - DNA, 23 bp, Homo sapiens
tgactggactattcttacaaggg

SEQ ID NO: 709 - DNA, 23 bp, Homo sapiens
ccctcctaggaatatatctgtgg

SEQ ID NO: 710 - DNA, 23 bp, Homo sapiens
tttcgttgacccttaactagggg

SEQ ID NO: 711 - DNA, 23 bp, Homo sapiens
cttgaaaattcaaatccacaggg

SEQ ID NO: 712 - DNA, 23 bp, Homo sapiens
tagagggagataaaggaaggggg

SEQ ID NO: 713 - DNA, 23 bp, Homo sapiens
ctaaacactgagccatgaggtgg

SEQ ID NO: 714 - DNA, 23 bp, Homo sapiens
gtagataattataactcaggagg

SEQ ID NO: 715 - DNA, 23 bp, Homo sapiens
gtgattagaaggcattacatggg

SEQ ID NO: 716 - DNA, 23 bp, Homo sapiens
ggtacctgagggatctgtgaggg

SEQ ID NO: 717 - DNA, 23 bp, Homo sapiens
actgaggttactgattagaaggg

SEQ ID NO: 718 - DNA, 23 bp, Homo sapiens
gatcagtgaaatttacattgggg

SEQ ID NO: 719 - DNA, 23 bp, Homo sapiens
aggcaaagtgtcctctagggtgg

SEQ ID NO: 720 - DNA, 23 bp, Homo sapiens
acagatgaattcaacacacccgg

SEQ ID NO: 721 - DNA, 23 bp, Homo sapiens
ccaaatcccctacattctcaggg

SEQ ID NO: 722 - DNA, 23 bp, Homo sapiens
tcagggataaaattctgtagagg

SEQ ID NO: 723 - DNA, 23 bp, Homo sapiens
ggagtgataacatattgcactgg

SEQ ID NO: 724 - DNA, 23 bp, Homo sapiens
tcaatattctagacatagtgggg

SEQ ID NO: 725 - DNA, 23 bp, Homo sapiens
atagtgctgggaatgccagaggg

SEQ ID NO: 726 - DNA, 23 bp, Homo sapiens
gtcacaaccctagaaatgggagg

SEQ ID NO: 727 - DNA, 23 bp, Homo sapiens
aggctaatactggtctgtggcgg

SEQ ID NO: 728 - DNA, 23 bp, Homo sapiens
atttttaaaggtgtgtctggagg

SEQ ID NO: 729 - DNA, 23 bp, Homo sapiens
tatatcagtaactttaaatgggg

SEQ ID NO: 730 - DNA, 23 bp, Homo sapiens
tattgcacagttacatctcaggg

SEQ ID NO: 731 - DNA, 23 bp, Homo sapiens
gtacaaatgtaggtatgaggagg

SEQ ID NO: 732 - DNA, 23 bp, Homo sapiens
actattcacggcaaccggagtgg

SEQ ID NO: 733 - DNA, 23 bp, Homo sapiens
ttcatcctaaggtcaataggagg

SEQ ID NO: 734 - DNA, 23 bp, Homo sapiens
tcaaaagagaaagaatcacttgg

SEQ ID NO: 735 - DNA, 23 bp, Homo sapiens
tctagggagtgcatgaacaaagg

SEQ ID NO: 736 - DNA, 23 bp, Homo sapiens
ccaaataataagtagaaccaggg

SEQ ID NO: 737 - DNA, 23 bp, Homo sapiens
acaacttttgaccagtagcgagg

SEQ ID NO: 738 - DNA, 23 bp, Homo sapiens
gaccaaccgcttcaccacaccgg

SEQ ID NO: 739 - DNA, 23 bp, Homo sapiens
gcaagcacatcattactgaaagg

SEQ ID NO: 740 - DNA, 23 bp, Homo sapiens
tgcgtcaagatgcatcatgaggg

SEQ ID NO: 741 - DNA, 23 bp, Homo sapiens
tgaatgctataggaataaagagg

SEQ ID NO: 742 - DNA, 23 bp, Homo sapiens
cagcgtgaaaaaatcctacaggg

SEQ ID NO: 743 - DNA, 23 bp, Homo sapiens
accactaacgtcacctcaggcgg

SEQ ID NO: 744 - DNA, 23 bp, Homo sapiens
agttgatcatcacatgcttgtgg

SEQ ID NO: 745 - DNA, 23 bp, Homo sapiens
tggcaccaaagattataagccgg

SEQ ID NO: 746 - DNA, 23 bp, Homo sapiens
ataggcagttcaactaagggcgg

SEQ ID NO: 747 - DNA, 23 bp, Homo sapiens
tgacaccagctggacatcagagg

SEQ ID NO: 748 - DNA, 23 bp, Homo sapiens
aaacgctgtactcatctagaggg

SEQ ID NO: 749 - DNA, 23 bp, Homo sapiens
ttataatctttggtgccagtagg

SEQ ID NO: 750 - DNA, 23 bp, Homo sapiens
aagagtaatcatatccctaaggg

SEQ ID NO: 751 - DNA, 23 bp, Homo sapiens
aaatggattgaatttagaggagg

SEQ ID NO: 752 - DNA, 23 bp, Homo sapiens
gatggcctgtgaatagctgtcgg

SEQ ID NO: 753 - DNA, 23 bp, Homo sapiens
tctgcgtgcattttttccagcgg

SEQ ID NO: 754 - DNA, 23 bp, Homo sapiens
cagttttctaccatagacaaggg

SEQ ID NO: 755 - DNA, 23 bp, Homo sapiens
tagatctgaaaagtaaggaacgg

SEQ ID NO: 756 - DNA, 23 bp, Homo sapiens
cattaccacaatagtccagtggg

SEQ ID NO: 757 - DNA, 23 bp, Homo sapiens
gtaacattaattaagaaccctgg

SEQ ID NO: 758 - DNA, 23 bp, Homo sapiens
tactgacctctaaaacttagggg

SEQ ID NO: 759 - DNA, 23 bp, Homo sapiens
gcatgcaagagaatcaatagagg

SEQ ID NO: 760 - DNA, 23 bp, Homo sapiens
gaaaaggaaacactactccaagg

SEQ ID NO: 761 - DNA, 23 bp, Homo sapiens
tcaccactcatatactctcaggg

SEQ ID NO: 762 - DNA, 23 bp, Homo sapiens
gtcggtgcttgagaaggtcatgg

SEQ ID NO: 763 - DNA, 23 bp, Homo sapiens
agaaggagactgatttcccaagg

SEQ ID NO: 764 - DNA, 23 bp, Homo sapiens
agcatgagtttccttccaagtgg

SEQ ID NO: 765 - DNA, 23 bp, Homo sapiens
gagtattaacaataacacaatgg

SEQ ID NO: 766 - DNA, 23 bp, Homo sapiens
ggcatctgagtgaaatatgtggg

SEQ ID NO: 767 - DNA, 23 bp, Homo sapiens
catagtgctgggaatgccagagg

SEQ ID NO: 768 - DNA, 23 bp, Homo sapiens
gtgaccaagcctcttgagagagg

SEQ ID NO: 769 - DNA, 23 bp, Homo sapiens
cctcagtctagagaactggctgg

SEQ ID NO: 770 - DNA, 23 bp, Homo sapiens
ggagtcattaactttagtggagg

SEQ ID NO: 771 - DNA, 23 bp, Homo sapiens
ccaacacctaattaatgacaggg

SEQ ID NO: 772 - DNA, 23 bp, Homo sapiens
acctgttgtaaaatatcgagagg

SEQ ID NO: 773 - DNA, 23 bp, Homo sapiens
tatacttaatctgtatgccacgg

SEQ ID NO: 774 - DNA, 23 bp, Homo sapiens
tactttttaaattctcagtgagg

SEQ ID NO: 775 - DNA, 23 bp, Homo sapiens
gcagagagaagacagataggtgg

SEQ ID NO: 776 - DNA, 23 bp, Homo sapiens
gagatgcaggaatatttgcaagg

SEQ ID NO: 777 - DNA, 23 bp, Homo sapiens
gctgccactacaaaagaatgagg

SEQ ID NO: 778 - DNA, 23 bp, Homo sapiens
gaagtgctttttatcccagacgg

SEQ ID NO: 779 - DNA, 23 bp, Homo sapiens
ataagtaaggaatcaaggtgagg

SEQ ID NO: 780 - DNA, 23 bp, Homo sapiens
gtaaatgcaataatgatatgggg

SEQ ID NO: 781 - DNA, 23 bp, Homo sapiens
acaatatttagcaattacacagg

SEQ ID NO: 782 - DNA, 23 bp, Homo sapiens
tctatttgttagatgacacaggg

SEQ ID NO: 783 - DNA, 23 bp, Homo sapiens
taaatatgaaaaccatacatggg

SEQ ID NO: 784 - DNA, 23 bp, Homo sapiens
actatgcccgtacataaacctgg

SEQ ID NO: 785 - DNA, 23 bp, Homo sapiens
aattactaatgaaagttgggagg

SEQ ID NO: 786 - DNA, 23 bp, Homo sapiens
atccttaacttggagtccagtgg

SEQ ID NO: 787 - DNA, 23 bp, Homo sapiens
gcaaagctcctattgtgggaagg

SEQ ID NO: 788 - DNA, 23 bp, Homo sapiens
acaaagtctattgtgatcagtgg

SEQ ID NO: 789 - DNA, 23 bp, Homo sapiens
ccaattcccctcctctagggagg

SEQ ID NO: 790 - DNA, 23 bp, Homo sapiens
gcagaccagagtaaataactagg

SEQ ID NO: 791 - DNA, 23 bp, Homo sapiens
attcttattgtatttccatgagg

SEQ ID NO: 792 - DNA, 23 bp, Homo sapiens
tttgctaaggcagctcagaaggg

SEQ ID NO: 793 - DNA, 23 bp, Homo sapiens
gagagcttgacactgcatgcagg

SEQ ID NO: 794 - DNA, 23 bp, Homo sapiens
gccaaattgatgcaaagtggtgg

SEQ ID NO: 795 - DNA, 23 bp, Homo sapiens
tctcagctaagggacgacatagg

SEQ ID NO: 796 - DNA, 23 bp, Homo sapiens
gcatgtttatcagtgttacacgg

SEQ ID NO: 797 - DNA, 23 bp, Homo sapiens
ggaaatggtgggttttccagtgg

SEQ ID NO: 798 - DNA, 23 bp, Homo sapiens
actacatactgaaggatttgggg

SEQ ID NO: 799 - DNA, 23 bp, Homo sapiens
tagggccctagaaacctccaagg

SEQ ID NO: 800 - DNA, 23 bp, Homo sapiens
gggaatccttctgatacagaagg

SEQ ID NO: 801 - DNA, 23 bp, Homo sapiens
ctctaggattggaataacacagg

SEQ ID NO: 802 - DNA, 23 bp, Homo sapiens
taatcagctgtctataccagtgg

SEQ ID NO: 803 - DNA, 23 bp, Homo sapiens
tcgtcacctactcccttgaaagg

SEQ ID NO: 804 - DNA, 23 bp, Homo sapiens
agagtacaagaagtaatcaaggg

SEQ ID NO: 805 - DNA, 23 bp, Homo sapiens
atactaatagaagacaaactagg

SEQ ID NO: 806 - DNA, 23 bp, Homo sapiens
ctatggttagtaatattagaggg

SEQ ID NO: 807 - DNA, 23 bp, Homo sapiens
tctgtaataaaaagtatgggtgg

SEQ ID NO: 808 - DNA, 23 bp, Homo sapiens
gcagaaataattccatgatgcgg

SEQ ID NO: 809 - DNA, 23 bp, Homo sapiens
agaagctatctgattactggagg

SEQ ID NO: 810 - DNA, 23 bp, Homo sapiens
tgcaaagtctgccagcacacagg

SEQ ID NO: 811 - DNA, 23 bp, Homo sapiens
ttgtggttatctgatacaggtgg

SEQ ID NO: 812 - DNA, 23 bp, Homo sapiens
agtatgcagattttaagtggtgg

SEQ ID NO: 813 - DNA, 23 bp, Homo sapiens
cgttgtgaaagaaatttccaggg

SEQ ID NO: 814 - DNA, 23 bp, Homo sapiens
atatgtaacacattaaaatgtgg

SEQ ID NO: 815 - DNA, 23 bp, Homo sapiens
gttttaaacaagactttaggcgg

SEQ ID NO: 816 - DNA, 23 bp, Homo sapiens
tattgttggaggtttcctgaagg

SEQ ID NO: 817 - DNA, 23 bp, Homo sapiens
cattgtatatataatagagaagg

SEQ ID NO: 818 - DNA, 23 bp, Homo sapiens
ttttgagtgactttttgtagagg

SEQ ID NO: 819 - DNA, 23 bp, Homo sapiens
ctcttcagaaagatgagcagggg

SEQ ID NO: 820 - DNA, 23 bp, Homo sapiens
tactcagattcaaaagagagagg

SEQ ID NO: 821 - DNA, 23 bp, Homo sapiens
tgtctgataaaaccataacaagg

SEQ ID NO: 822 - DNA, 23 bp, Homo sapiens
tcacgccttggcctaaacaaggg

SEQ ID NO: 823 - DNA, 23 bp, Homo sapiens
aatgcaggtcaaaagtgtgtggg

SEQ ID NO: 824 - DNA, 23 bp, Homo sapiens
gggaaattggaacaacaggaagg

SEQ ID NO: 825 - DNA, 23 bp, Homo sapiens
acatagcatttgtgagtgaaggg

SEQ ID NO: 826 - DNA, 23 bp, Homo sapiens
gaagtgtgaataaaagttagggg

SEQ ID NO: 827 - DNA, 23 bp, Homo sapiens
cccaacagtctaataacgatagg

SEQ ID NO: 828 - DNA, 23 bp, Homo sapiens
cagtgagaagaatatagagaggg

SEQ ID NO: 829 - DNA, 23 bp, Homo sapiens
tgcattggcagtgacagcggagg

SEQ ID NO: 830 - DNA, 23 bp, Homo sapiens
tgacctacctgagaaagaagtgg

SEQ ID NO: 831 - DNA, 23 bp, Homo sapiens
gtcatatagtgagatgaggatgg

SEQ ID NO: 832 - DNA, 23 bp, Homo sapiens
cagctactctacacgcagcatgg

SEQ ID NO: 833 - DNA, 23 bp, Homo sapiens
gtagcactgtgtacactgaaagg

SEQ ID NO: 834 - DNA, 23 bp, Homo sapiens
agtcgggtcacaggaagagtggg

SEQ ID NO: 835 - DNA, 23 bp, Homo sapiens
ttattgtccatataaatagacgg

SEQ ID NO: 836 - DNA, 23 bp, Homo sapiens
tttaatcaaaaatttcaaccagg

SEQ ID NO: 837 - DNA, 23 bp, Homo sapiens
taagtcccttctttaaactgtgg

SEQ ID NO: 838 - DNA, 23 bp, Homo sapiens
aagtctaagaacaaatcagaagg

SEQ ID NO: 839 - DNA, 23 bp, Homo sapiens
accatgccctctactgatgtggg

SEQ ID NO: 840 - DNA, 23 bp, Homo sapiens
tttgcataaaatctaccagtagg

SEQ ID NO: 841 - DNA, 23 bp, Homo sapiens
tttaaagtggcacaaacagaggg

SEQ ID NO: 842 - DNA, 23 bp, Homo sapiens
acgatggagtgcagaatatgggg

SEQ ID NO: 843 - DNA, 23 bp, Homo sapiens
tcatttatacagaagacccacgg

SEQ ID NO: 844 - DNA, 23 bp, Homo sapiens
atttatcagtagtttaggcgtgg

SEQ ID NO: 845 - DNA, 23 bp, Homo sapiens
agttccatgtcctagctcgaggg

SEQ ID NO: 846 - DNA, 23 bp, Homo sapiens
aattctgcctgaataccagaagg

SEQ ID NO: 847 - DNA, 23 bp, Homo sapiens
taaatatgcaactcatggagtgg

SEQ ID NO: 848 - DNA, 23 bp, Homo sapiens
tggagggcgacgcgcagaggcgg

SEQ ID NO: 849 - DNA, 23 bp, Homo sapiens
gacaccagctggacatcagaggg

SEQ ID NO: 850 - DNA, 23 bp, Homo sapiens
aagcaattatgtcgataactggg

SEQ ID NO: 851 - DNA, 23 bp, Homo sapiens
agcccaccaactgaaatgaaagg

SEQ ID NO: 852 - DNA, 23 bp, Homo sapiens
tcttttgtagtggcagccagagg

SEQ ID NO: 853 - DNA, 23 bp, Homo sapiens
ggaggcaccagtgtttaaagtgg

SEQ ID NO: 854 - DNA, 23 bp, Homo sapiens
atgccaacctgaagaacgtgagg

SEQ ID NO: 855 - DNA, 23 bp, Homo sapiens
catctaccattatttccacaggg

SEQ ID NO: 856 - DNA, 23 bp, Homo sapiens
cttaggaatatggagcaatgagg

SEQ ID NO: 857 - DNA, 23 bp, Homo sapiens
agttatttctagaggaactgagg

SEQ ID NO: 858 - DNA, 23 bp, Homo sapiens
acacatccttgaagaatgagagg

SEQ ID NO: 859 - DNA, 23 bp, Homo sapiens
taaactttcactcaaacccatgg

SEQ ID NO: 860 - DNA, 23 bp, Homo sapiens
atatggcaaactaaagaaagggg

SEQ ID NO: 861 - DNA, 23 bp, Homo sapiens
gtttaaagtggcacaaacagagg

SEQ ID NO: 862 - DNA, 23 bp, Homo sapiens
acaggagctctaagtccagtggg

SEQ ID NO: 863 - DNA, 23 bp, Homo sapiens
tcccccagttcccattagtgagg

SEQ ID NO: 864 - DNA, 23 bp, Homo sapiens
attgtccatttactggacaatgg

SEQ ID NO: 865 - DNA, 23 bp, Homo sapiens
ttgttgaatgctgatccagaagg

SEQ ID NO: 866 - DNA, 23 bp, Homo sapiens
caaagagcgtaggaattcagtgg

SEQ ID NO: 867 - DNA, 23 bp, Homo sapiens
ggtggctttaggttaactaaggg

SEQ ID NO: 868 - DNA, 23 bp, Homo sapiens
aatgttacatgaaaaatgaacgg

SEQ ID NO: 869 - DNA, 23 bp, Homo sapiens
ggattaaatcatgaacaggaagg

SEQ ID NO: 870 - DNA, 23 bp, Homo sapiens
tggtctctatatcagtcgatggg

SEQ ID NO: 871 - DNA, 23 bp, Homo sapiens
cataaattaatgcaaacgtgtgg

SEQ ID NO: 872 - DNA, 23 bp, Homo sapiens
gactggactattcttacaagggg

SEQ ID NO: 873 - DNA, 23 bp, Homo sapiens
gttggaaaataagagggcagagg

SEQ ID NO: 874 - DNA, 23 bp, Homo sapiens
atcaaccagtaatttctgaaggg

SEQ ID NO: 875 - DNA, 23 bp, Homo sapiens
agaaaatgtatctttaaaagggg

SEQ ID NO: 876 - DNA, 23 bp, Homo sapiens
ttaggaagattctatgcacaggg

SEQ ID NO: 877 - DNA, 23 bp, Homo sapiens
acaatagtttacatttactgagg

SEQ ID NO: 878 - DNA, 23 bp, Homo sapiens
ggcacagctaccaggaaaagggg

SEQ ID NO: 879 - DNA, 23 bp, Homo sapiens
ggtagccaattatggcccacagg

SEQ ID NO: 880 - DNA, 23 bp, Homo sapiens
attgatttgaatatacacttcgg

SEQ ID NO: 881 - DNA, 23 bp, Homo sapiens
agatgagaagatagtctttgggg

SEQ ID NO: 882 - DNA, 23 bp, Homo sapiens
cgagaaatcatagaccagctggg

SEQ ID NO: 883 - DNA, 23 bp, Homo sapiens
tctctctcaaaagtactgcaagg

SEQ ID NO: 884 - DNA, 23 bp, Homo sapiens
actactgtataggaactacatgg

SEQ ID NO: 885 - DNA, 23 bp, Homo sapiens
atatttaaaataaaaaggggagg

SEQ ID NO: 886 - DNA, 23 bp, Homo sapiens
aatttagatccctttccaagtgg

SEQ ID NO: 887 - DNA, 23 bp, Homo sapiens
atattttccacagtaatcagtgg

SEQ ID NO: 888 - DNA, 23 bp, Homo sapiens
ttgggaatttcagtaggcaacgg

SEQ ID NO: 889 - DNA, 23 bp, Homo sapiens
ttttaaatgatatttccttgggg

SEQ ID NO: 890 - DNA, 23 bp, Homo sapiens
tgtatctacttggaactcgtggg

SEQ ID NO: 891 - DNA, 23 bp, Homo sapiens
agacaaatgagaatgaggaaggg

SEQ ID NO: 892 - DNA, 23 bp, Homo sapiens
gaattcacaaacacagatagggg

SEQ ID NO: 893 - DNA, 23 bp, Homo sapiens
cacacctctggaaggaacacagg

SEQ ID NO: 894 - DNA, 23 bp, Homo sapiens
gtgactgatatgaattcaagggg

SEQ ID NO: 895 - DNA, 23 bp, Homo sapiens
gtgttattccaatcctagagtgg

SEQ ID NO: 896 - DNA, 23 bp, Homo sapiens
atatatcaatatctcctgcaggg

SEQ ID NO: 897 - DNA, 23 bp, Homo sapiens
ttattttctggttggcactgagg

SEQ ID NO: 898 - DNA, 23 bp, Homo sapiens
tattttacaacaggtataagcgg

SEQ ID NO: 899 - DNA, 23 bp, Homo sapiens
acagtcctagacacccatagagg

SEQ ID NO: 900 - DNA, 23 bp, Homo sapiens
atgctaatagattatccaagtgg

SEQ ID NO: 901 - DNA, 23 bp, Homo sapiens
tagactatatttgtagctgtggg

SEQ ID NO: 902 - DNA, 23 bp, Homo sapiens
cattctcaaaaattatatcgagg

SEQ ID NO: 903 - DNA, 23 bp, Homo sapiens
gacaatgcctgagactacctggg

SEQ ID NO: 904 - DNA, 23 bp, Homo sapiens
ggtcatctagtctctaatgaggg

SEQ ID NO: 905 - DNA, 23 bp, Homo sapiens
gtctaagctagtactaggtgagg

SEQ ID NO: 906 - DNA, 23 bp, Homo sapiens
ttgttagacccatctatgagtgg

SEQ ID NO: 907 - DNA, 23 bp, Homo sapiens
atatatgcttcaattttgtgagg

SEQ ID NO: 908 - DNA, 23 bp, Homo sapiens
gcttattaggaaaatcacattgg

SEQ ID NO: 909 - DNA, 23 bp, Homo sapiens
gttaaacatcaatagagggaggg

SEQ ID NO: 910 - DNA, 23 bp, Homo sapiens
acgaattattcatctacccgtgg

SEQ ID NO: 911 - DNA, 23 bp, Homo sapiens
gagcagtatgatgaagtgcaggg

SEQ ID NO: 912 - DNA, 23 bp, Homo sapiens
tgatttaagtgagtgtatcaggg

SEQ ID NO: 913 - DNA, 23 bp, Homo sapiens
cagcatggttcagttgatggtgg

SEQ ID NO: 914 - DNA, 23 bp, Homo sapiens
ctactagtaacacaatactcagg

SEQ ID NO: 915 - DNA, 23 bp, Homo sapiens
aagcattgtaaggtactacatgg

SEQ ID NO: 916 - DNA, 23 bp, Homo sapiens
tttctaagaactaggccttgggg

SEQ ID NO: 917 - DNA, 23 bp, Homo sapiens
gaaaggagagaagctttgagagg

SEQ ID NO: 918 - DNA, 23 bp, Homo sapiens
attttacaccaggtcgaaggagg

SEQ ID NO: 919 - DNA, 23 bp, Homo sapiens
atgcccagagccataaggagtgg

SEQ ID NO: 920 - DNA, 23 bp, Homo sapiens
aaccttatatgtagtgaccatgg

SEQ ID NO: 921 - DNA, 23 bp, Homo sapiens
taacaaaaactagaacaaagtgg

SEQ ID NO: 922 - DNA, 23 bp, Homo sapiens
acagggaccatcctatccatagg

SEQ ID NO: 923 - DNA, 23 bp, Homo sapiens
ggaagaagctgggagtccaaagg

SEQ ID NO: 924 - DNA, 23 bp, Homo sapiens
tttctgctaccagtagaagtggg

SEQ ID NO: 925 - DNA, 23 bp, Homo sapiens
tgattttaaagaaatagtagtgg

SEQ ID NO: 926 - DNA, 23 bp, Homo sapiens
tccgtgagcctaaagaacaatgg

SEQ ID NO: 927 - DNA, 23 bp, Homo sapiens
tatacaaaacaaaacatgagagg

SEQ ID NO: 928 - DNA, 23 bp, Homo sapiens
actaaaatagctaacttcagagg

SEQ ID NO: 929 - DNA, 23 bp, Homo sapiens
cctacactatgcaagtgggttgg

SEQ ID NO: 930 - DNA, 23 bp, Homo sapiens
agtaacacaaagcaaaaatgtgg

SEQ ID NO: 931 - DNA, 23 bp, Homo sapiens
tgtcactttcatttattcggggg

SEQ ID NO: 932 - DNA, 23 bp, Homo sapiens
atgacaggtttatattctggagg

SEQ ID NO: 933 - DNA, 23 bp, Homo sapiens
attggcttagaaaacatgagtgg

SEQ ID NO: 934 - DNA, 23 bp, Homo sapiens
tatacttatattcaagcacaggg

SEQ ID NO: 935 - DNA, 23 bp, Homo sapiens
agagttcccaggacgcaggaagg

SEQ ID NO: 936 - DNA, 23 bp, Homo sapiens
aaaaggctgccagagtaacacgg

SEQ ID NO: 937 - DNA, 23 bp, Homo sapiens
aaagtaagcaaaattgaggaggg

SEQ ID NO: 938 - DNA, 23 bp, Homo sapiens
actcttgatttcactgacagagg

SEQ ID NO: 939 - DNA, 23 bp, Homo sapiens
catgaataaatacattcaagagg

SEQ ID NO: 940 - DNA, 23 bp, Homo sapiens
gtagaccgacagctattcacagg

SEQ ID NO: 941 - DNA, 23 bp, Homo sapiens
taactcatagttatataatgggg

SEQ ID NO: 942 - DNA, 23 bp, Homo sapiens
ctaataacgataggaaacaatgg

SEQ ID NO: 943 - DNA, 23 bp, Homo sapiens
attgccttcttacctgacgatgg

SEQ ID NO: 944 - DNA, 23 bp, Homo sapiens
tttcatacacactcatcatgggg

SEQ ID NO: 945 - DNA, 23 bp, Homo sapiens
tcattcagagattataaccaggg

SEQ ID NO: 946 - DNA, 23 bp, Homo sapiens
atttactgtggcaacaggagagg

SEQ ID NO: 947 - DNA, 23 bp, Homo sapiens
tgtctgtgagacaaaatgaaagg

SEQ ID NO: 948 - DNA, 23 bp, Homo sapiens
tgttgaccctgatgatgctgagg

SEQ ID NO: 949 - DNA, 23 bp, Homo sapiens
tagtgagaccactctaaggatgg

SEQ ID NO: 950 - DNA, 23 bp, Homo sapiens
ctacataaactctattcatgggg

SEQ ID NO: 951 - DNA, 23 bp, Homo sapiens
gctttggtgggaagaagtagagg

SEQ ID NO: 952 - DNA, 23 bp, Homo sapiens
tcccttaagacttactctgacgg

SEQ ID NO: 953 - DNA, 23 bp, Homo sapiens
cacagggcctggattataagggg

SEQ ID NO: 954 - DNA, 23 bp, Homo sapiens
acgcagattgtaattagaggtgg

SEQ ID NO: 955 - DNA, 23 bp, Homo sapiens
gtaagccacaagtgtaatggggg

SEQ ID NO: 956 - DNA, 23 bp, Homo sapiens
aatagcaaggagtagatacaggg

SEQ ID NO: 957 - DNA, 23 bp, Homo sapiens
cctttaagtaagacagccagggg

SEQ ID NO: 958 - DNA, 23 bp, Homo sapiens
ttatacaaataaatttacaaggg

SEQ ID NO: 959 - DNA, 23 bp, Homo sapiens
tcgaatgtggatatcccaagagg

SEQ ID NO: 960 - DNA, 23 bp, Homo sapiens
tggggacaacagcaaagtggtgg

SEQ ID NO: 961 - DNA, 23 bp, Homo sapiens
attcaggtttgggatcaggaagg

SEQ ID NO: 962 - DNA, 23 bp, Homo sapiens
gctcttcagaaagatgagcaggg

SEQ ID NO: 963 - DNA, 23 bp, Homo sapiens
gcgaaaaccagagccacactagg

SEQ ID NO: 964 - DNA, 23 bp, Homo sapiens
acttcacatatgcctcactaagg

SEQ ID NO: 965 - DNA, 23 bp, Homo sapiens
cataaactattagtgcctgaggg

SEQ ID NO: 966 - DNA, 23 bp, Homo sapiens
atacatagcccatatgtcaaagg

SEQ ID NO: 967 - DNA, 23 bp, Homo sapiens
ggagagctgcagcctacatgagg

SEQ ID NO: 968 - DNA, 23 bp, Homo sapiens
ccctacataatagtatgcaaggg

SEQ ID NO: 969 - DNA, 23 bp, Homo sapiens
atagtgtgggtcaactgaagggg

SEQ ID NO: 970 - DNA, 23 bp, Homo sapiens
gaatggattggacagacgctagg

SEQ ID NO: 971 - DNA, 23 bp, Homo sapiens
tctgtgacgacgatcattggtgg

SEQ ID NO: 972 - DNA, 23 bp, Homo sapiens
ttcttgtattaaagacgtagagg

SEQ ID NO: 973 - DNA, 23 bp, Homo sapiens
gatcggcaaaggaagaagctggg

SEQ ID NO: 974 - DNA, 23 bp, Homo sapiens
aatacctacataaaaataagggg

SEQ ID NO: 975 - DNA, 23 bp, Homo sapiens
ataaaatatcatgatgatggagg

SEQ ID NO: 976 - DNA, 23 bp, Homo sapiens
ttaatactgcaatataagcaagg

SEQ ID NO: 977 - DNA, 23 bp, Homo sapiens
acttatagctacgatccacttgg

SEQ ID NO: 978 - DNA, 23 bp, Homo sapiens
tcagggtaatgcttagaggtggg

SEQ ID NO: 979 - DNA, 23 bp, Homo sapiens
tttagcatagttgcaatgtgtgg

SEQ ID NO: 980 - DNA, 23 bp, Homo sapiens
attttggattctggagacagtgg

SEQ ID NO: 981 - DNA, 23 bp, Homo sapiens
ccagtttccaaaaaagtctgagg

SEQ ID NO: 982 - DNA, 23 bp, Homo sapiens
ataattagacaattcagagaagg

SEQ ID NO: 983 - DNA, 23 bp, Homo sapiens
aaaagaacctaaagtacacaggg

SEQ ID NO: 984 - DNA, 23 bp, Homo sapiens
aatggacatattttcccaagtgg

SEQ ID NO: 985 - DNA, 23 bp, Homo sapiens
ataaattcatagtcaatatgggg

SEQ ID NO: 986 - DNA, 23 bp, Homo sapiens
tggtggcttgaggaaatgtgggg

SEQ ID NO: 987 - DNA, 23 bp, Homo sapiens
gtgctaacatgcagtagaggagg

SEQ ID NO: 988 - DNA, 23 bp, Homo sapiens
ttttttttcagtcaatctagagg

SEQ ID NO: 989 - DNA, 23 bp, Homo sapiens
agatgtcattggaaaaatggggg

SEQ ID NO: 990 - DNA, 23 bp, Homo sapiens
tgttagacccatctatgagtggg

SEQ ID NO: 991 - DNA, 23 bp, Homo sapiens
acaggattgttgattgcctgtgg

SEQ ID NO: 992 - DNA, 23 bp, Homo sapiens
agactattgccttcatagcgagg

SEQ ID NO: 993 - DNA, 23 bp, Homo sapiens
gatgaatgatcacattaggaagg

SEQ ID NO: 994 - DNA, 23 bp, Homo sapiens
acaagtgctagtgcgtgaagtgg

SEQ ID NO: 995 - DNA, 23 bp, Homo sapiens
tcagtaaattaattagcaagtgg

SEQ ID NO: 996 - DNA, 23 bp, Homo sapiens
tgcctttgatgaaaatacgtggg

SEQ ID NO: 997 - DNA, 23 bp, Homo sapiens
cctccaccttgagggctcagagg

SEQ ID NO: 998 - DNA, 23 bp, Homo sapiens
aaaaaaagaaacttccaaagagg

SEQ ID NO: 999 - DNA, 23 bp, Homo sapiens
tccatagacaatgaagcccatgg

SEQ ID NO: 1000 - DNA, 23 bp, Homo sapiens
tggcaattaaatgtatctcaggg

SEQ ID NO: 1001 - DNA, 23 bp, Homo sapiens
acactcccctctcacagcaatgg

SEQ ID NO: 1002 - DNA, 23 bp, Homo sapiens
gtgtataatacatgccaagaggg

SEQ ID NO: 1003 - DNA, 23 bp, Homo sapiens
ccaacccacttgcatagtgtagg

SEQ ID NO: 1004 - DNA, 23 bp, Homo sapiens
gcaagtccaaaggcatgtgatgg

SEQ ID NO: 1005 - DNA, 23 bp, Homo sapiens
aattgtttatgactgtgggatgg

SEQ ID NO: 1006 - DNA, 23 bp, Homo sapiens
atacctcaaaggaaaatggccgg

SEQ ID NO: 1007 - DNA, 23 bp, Homo sapiens
gtagaagtactatatataggagg

SEQ ID NO: 1008 - DNA, 23 bp, Homo sapiens
actttgcctacacaaaaagctgg

SEQ ID NO: 1009 - DNA, 23 bp, Homo sapiens
aaccaacttgagagagaaggcgg

SEQ ID NO: 1010 - DNA, 23 bp, Homo sapiens
tcaagggcttgtgaagatgaggg

SEQ ID NO: 1011 - DNA, 23 bp, Homo sapiens
cagaggagaaaaatgagaagagg

SEQ ID NO: 1012 - DNA, 23 bp, Homo sapiens
gcagacatattatctgatcaggg

SEQ ID NO: 1013 - DNA, 23 bp, Homo sapiens
gactggctagactagggctaggg

SEQ ID NO: 1014 - DNA, 23 bp, Homo sapiens
acatacggatgaattcagtaagg

SEQ ID NO: 1015 - DNA, 23 bp, Homo sapiens
aaacaacatctacctgtaagggg

SEQ ID NO: 1016 - DNA, 23 bp, Homo sapiens
atgagagctttatactaagacgg

SEQ ID NO: 1017 - DNA, 23 bp, Homo sapiens
ttttgcatccaaatgctacaggg

SEQ ID NO: 1018 - DNA, 23 bp, Homo sapiens
catttgaataaaagaatctgagg

SEQ ID NO: 1019 - DNA, 23 bp, Homo sapiens
tcaaatccagatgctaccacagg

SEQ ID NO: 1020 - DNA, 23 bp, Homo sapiens
atgaataaatacattcaagaggg

SEQ ID NO: 1021 - DNA, 23 bp, Homo sapiens
agcaatgtcagcgagcttggtgg

SEQ ID NO: 1022 - DNA, 23 bp, Homo sapiens
tacattttttatgagccccgtgg

SEQ ID NO: 1023 - DNA, 23 bp, Homo sapiens
aaaggcattatggtagggggagg

SEQ ID NO: 1024 - DNA, 23 bp, Homo sapiens
tagttttaatggcccaaaagggg

SEQ ID NO: 1025 - DNA, 23 bp, Homo sapiens
gccaagtgccaaatggtgcaggg

SEQ ID NO: 1026 - DNA, 23 bp, Homo sapiens
ttagtgaggcatatgtgaagtgg

SEQ ID NO: 1027 - DNA, 23 bp, Homo sapiens
tcactgagttgaacttgtagagg

SEQ ID NO: 1028 - DNA, 23 bp, Homo sapiens
tctactgcatataacactgatgg

SEQ ID NO: 1029 - DNA, 23 bp, Homo sapiens
agggcaaaagaactgtagacggg

SEQ ID NO: 1030 - DNA, 23 bp, Homo sapiens
tagtacttggcataaacagtagg

SEQ ID NO: 1031 - DNA, 23 bp, Homo sapiens
aagttaaaatggcaacaccatgg

SEQ ID NO: 1032 - DNA, 23 bp, Homo sapiens
ctatcttttcaagatccctgtgg

SEQ ID NO: 1033 - DNA, 23 bp, Homo sapiens
accacagatatattcctaggagg

SEQ ID NO: 1034 - DNA, 23 bp, Homo sapiens
atttgcagccttttgtagagggg

SEQ ID NO: 1035 - DNA, 23 bp, Homo sapiens
atttacgtatattatgcccaagg

SEQ ID NO: 1036 - DNA, 23 bp, Homo sapiens
atggcagaagaactaaaggcagg

SEQ ID NO: 1037 - DNA, 23 bp, Homo sapiens
ataatgatttctgcattgtgtgg

SEQ ID NO: 1038 - DNA, 23 bp, Homo sapiens
ctgtttgtatggctagggtgagg

SEQ ID NO: 1039 - DNA, 23 bp, Homo sapiens
ttttggcttctctcctagggagg

SEQ ID NO: 1040 - DNA, 23 bp, Homo sapiens
acattttttatgagccccgtggg

SEQ ID NO: 1041 - DNA, 23 bp, Homo sapiens
aagactataaaactgaggaaagg

SEQ ID NO: 1042 - DNA, 23 bp, Homo sapiens
aatgcaattacaattatgcaagg

SEQ ID NO: 1043 - DNA, 23 bp, Homo sapiens
tctctgttggaagtgaatagggg

SEQ ID NO: 1044 - DNA, 23 bp, Homo sapiens
caaaggaaataaaagtatggcgg

SEQ ID NO: 1045 - DNA, 23 bp, Homo sapiens
tctgaggtgagaagctagtgagg

SEQ ID NO: 1046 - DNA, 23 bp, Homo sapiens
ctgccctctgtaaatatgagagg

SEQ ID NO: 1047 - DNA, 23 bp, Homo sapiens
tattccaagggcctaccgcaagg

SEQ ID NO: 1048 - DNA, 23 bp, Homo sapiens
agaacccagctaagagagggagg

SEQ ID NO: 1049 - DNA, 23 bp, Homo sapiens
tctatatttaaaataaaaagggg

SEQ ID NO: 1050 - DNA, 23 bp, Homo sapiens
cttgaggctgcaaagagcgtagg

SEQ ID NO: 1051 - DNA, 23 bp, Homo sapiens
tcaataaattcgtagccctaggg

SEQ ID NO: 1052 - DNA, 23 bp, Homo sapiens
aagggagtaggtgacgaagatgg

SEQ ID NO: 1053 - DNA, 23 bp, Homo sapiens
aggtgtgtctcagggtagagagg

SEQ ID NO: 1054 - DNA, 23 bp, Homo sapiens
ggccttccttagaatctgcacgg

SEQ ID NO: 1055 - DNA, 23 bp, Homo sapiens
ttgagagtgattgttaccaaagg

SEQ ID NO: 1056 - DNA, 23 bp, Homo sapiens
aaatatatattcaataccatagg

SEQ ID NO: 1057 - DNA, 23 bp, Homo sapiens
ctcacagtcgcccctatgagggg

SEQ ID NO: 1058 - DNA, 23 bp, Homo sapiens
ggactgctgagtttctgtagagg

SEQ ID NO: 1059 - DNA, 23 bp, Homo sapiens
gagtggttccttcatgacatggg

SEQ ID NO: 1060 - DNA, 23 bp, Homo sapiens
aatgaaagttgtaacaggagagg

SEQ ID NO: 1061 - DNA, 23 bp, Homo sapiens
tgaccactaactaaatctgaagg

SEQ ID NO: 1062 - DNA, 23 bp, Homo sapiens
gcctaatctaattcatagtgagg

SEQ ID NO: 1063 - DNA, 23 bp, Homo sapiens
agtgctgacttaaagggcaaggg

SEQ ID NO: 1064 - DNA, 23 bp, Homo sapiens
aggcagcgataaaaaaaacctgg

SEQ ID NO: 1065 - DNA, 23 bp, Homo sapiens
ttgcagtttgtgtggttacgtgg

SEQ ID NO: 1066 - DNA, 23 bp, Homo sapiens
gaaagtacgcatgcacatgtagg

SEQ ID NO: 1067 - DNA, 23 bp, Homo sapiens
ctagcctgagccacacacaatgg

SEQ ID NO: 1068 - DNA, 23 bp, Homo sapiens
tgggtccccattaattagcaagg

SEQ ID NO: 1069 - DNA, 23 bp, Homo sapiens
agtaagcctttggatggggaagg

SEQ ID NO: 1070 - DNA, 23 bp, Homo sapiens
actcccaaagatatataagtcgg

SEQ ID NO: 1071 - DNA, 23 bp, Homo sapiens
catttactagataacaaacatgg

SEQ ID NO: 1072 - DNA, 23 bp, Homo sapiens
ttttatagcatgaaaccccaagg

SEQ ID NO: 1073 - DNA, 23 bp, Homo sapiens
tttgcaaaacaatttaagagggg

SEQ ID NO: 1074 - DNA, 23 bp, Homo sapiens
acaacgtgctattagcaagtagg

SEQ ID NO: 1075 - DNA, 23 bp, Homo sapiens
ggggggatctcctaaacgaaagg

SEQ ID NO: 1076 - DNA, 23 bp, Homo sapiens
tccctgacaacacgaaagcatgg

SEQ ID NO: 1077 - DNA, 23 bp, Homo sapiens
atcatctcaaagaactacatggg

SEQ ID NO: 1078 - DNA, 23 bp, Homo sapiens
gtaggaaggaaggcaaactaggg

SEQ ID NO: 1079 - DNA, 23 bp, Homo sapiens
ggaataaaataagaatgcgaagg

SEQ ID NO: 1080 - DNA, 23 bp, Homo sapiens
ccttacatacatcacggagttgg

SEQ ID NO: 1081 - DNA, 23 bp, Homo sapiens
gagcatcatgaccttacaagagg

SEQ ID NO: 1082 - DNA, 23 bp, Homo sapiens
tttcaaagaaggctgaccacagg

SEQ ID NO: 1083 - DNA, 23 bp, Homo sapiens
agctagtttttttttcagggggg

SEQ ID NO: 1084 - DNA, 23 bp, Homo sapiens
tgtcttctagggtacactgtagg

SEQ ID NO: 1085 - DNA, 23 bp, Homo sapiens
tcattcttttgagcatgaggagg

SEQ ID NO: 1086 - DNA, 23 bp, Homo sapiens
actatcagcaattagtgagaggg

SEQ ID NO: 1087 - DNA, 23 bp, Homo sapiens
agtaccttacagtgcaagcaggg

SEQ ID NO: 1088 - DNA, 23 bp, Homo sapiens
cgatcagctttaagggacagtgg

SEQ ID NO: 1089 - DNA, 23 bp, Homo sapiens
tatctttgattgagggaaggagg

SEQ ID NO: 1090 - DNA, 23 bp, Homo sapiens
tgtaatccagaatggcccatagg

SEQ ID NO: 1091 - DNA, 23 bp, Homo sapiens
aatcattattatcaacagaaggg

SEQ ID NO: 1092 - DNA, 23 bp, Homo sapiens
tttttttacaagggaatgtgagg

SEQ ID NO: 1093 - DNA, 23 bp, Homo sapiens
tagaattcaagcaatttggaggg

SEQ ID NO: 1094 - DNA, 23 bp, Homo sapiens
ctattattcaaaagccagcaagg

SEQ ID NO: 1095 - DNA, 23 bp, Homo sapiens
tcttataataggttattggaagg

SEQ ID NO: 1096 - DNA, 23 bp, Homo sapiens
gggctgccaggtaaattggaagg

SEQ ID NO: 1097 - DNA, 23 bp, Homo sapiens
agaataggcagttcaactaaggg

SEQ ID NO: 1098 - DNA, 23 bp, Homo sapiens
tgatcgatctatgttttgggagg

SEQ ID NO: 1099 - DNA, 23 bp, Homo sapiens
gtgtgtctatgaaaaggagtagg

SEQ ID NO: 1100 - DNA, 23 bp, Homo sapiens
agaaccctacgcataagagcagg

SEQ ID NO: 1101 - DNA, 23 bp, Homo sapiens
tgttcagttttggtgcaaggtgg

SEQ ID NO: 1102 - DNA, 23 bp, Homo sapiens
tgtgctagcataatctcactagg

SEQ ID NO: 1103 - DNA, 23 bp, Homo sapiens
aaaaagagccccaatttgtgggg

SEQ ID NO: 1104 - DNA, 23 bp, Homo sapiens
gctattaggtctatgtgaggtgg

SEQ ID NO: 1105 - DNA, 23 bp, Homo sapiens
aatcctactaattattaacatgg

SEQ ID NO: 1106 - DNA, 23 bp, Homo sapiens
aatgtagtacatatccccattgg

SEQ ID NO: 1107 - DNA, 23 bp, Homo sapiens
atttcttaaaatcctcacgaagg

SEQ ID NO: 1108 - DNA, 23 bp, Homo sapiens
aggtgagagctggcaaacacagg

SEQ ID NO: 1109 - DNA, 23 bp, Homo sapiens
ttattataaaagcaggtcagagg

SEQ ID NO: 1110 - DNA, 23 bp, Homo sapiens
ggaaggatctgcgctaggtgtgg

SEQ ID NO: 1111 - DNA, 23 bp, Homo sapiens
gcatgtagattagcctcacaggg

SEQ ID NO: 1112 - DNA, 23 bp, Homo sapiens
agattagcgccatctcccatggg

SEQ ID NO: 1113 - DNA, 23 bp, Homo sapiens
tgaacatagggatatgagaaggg

SEQ ID NO: 1114 - DNA, 23 bp, Homo sapiens
ttcctgaaggagacttagaacgg

SEQ ID NO: 1115 - DNA, 23 bp, Homo sapiens
tccaaactgataagtcctcaggg

SEQ ID NO: 1116 - DNA, 23 bp, Homo sapiens
ttttaatcaagtatattcggtgg

SEQ ID NO: 1117 - DNA, 23 bp, Homo sapiens
atacacctaattgctctctaggg

SEQ ID NO: 1118 - DNA, 23 bp, Homo sapiens
tttcaacctctagccttcaaggg

SEQ ID NO: 1119 - DNA, 23 bp, Homo sapiens
gcataagaggacactgcacatgg

SEQ ID NO: 1120 - DNA, 23 bp, Homo sapiens
cacatgattgagtatcttagggg

SEQ ID NO: 1121 - DNA, 23 bp, Homo sapiens
gctgtccttgctaattaatgggg

SEQ ID NO: 1122 - DNA, 23 bp, Homo sapiens
cattgttgactcaaggacactgg

SEQ ID NO: 1123 - DNA, 23 bp, Homo sapiens
gagttgttgaaaaaccctgcagg

SEQ ID NO: 1124 - DNA, 23 bp, Homo sapiens
ctgtgcataaacactcaaccagg

SEQ ID NO: 1125 - DNA, 23 bp, Homo sapiens
acgcaaattctagtttaaagcgg

SEQ ID NO: 1126 - DNA, 23 bp, Homo sapiens
acactccacaagtcaaagatggg

SEQ ID NO: 1127 - DNA, 23 bp, Homo sapiens
cctgtttgtttctttcactgtgg

SEQ ID NO: 1128 - DNA, 23 bp, Homo sapiens
atccaagactgaaatggtagggg

SEQ ID NO: 1129 - DNA, 23 bp, Homo sapiens
cttctcaagtgtctaagctgagg

SEQ ID NO: 1130 - DNA, 23 bp, Homo sapiens
aacatgtcatctggtaaccatgg

SEQ ID NO: 1131 - DNA, 23 bp, Homo sapiens
ttagaaataaactagccagaagg

SEQ ID NO: 1132 - DNA, 23 bp, Homo sapiens
tatggttctgaattagcactcgg

SEQ ID NO: 1133 - DNA, 23 bp, Homo sapiens
agggaggcattattgctcaatgg

SEQ ID NO: 1134 - DNA, 23 bp, Homo sapiens
aattctgtgattaagtggcaggg

SEQ ID NO: 1135 - DNA, 23 bp, Homo sapiens
tagaccctacactatgcaagtgg

SEQ ID NO: 1136 - DNA, 23 bp, Homo sapiens
tcctcactaatgggaactggggg

SEQ ID NO: 1137 - DNA, 23 bp, Homo sapiens
aactatcagcaattagtgagagg

SEQ ID NO: 1138 - DNA, 23 bp, Homo sapiens
agttcacctacatctaaagaagg

SEQ ID NO: 1139 - DNA, 23 bp, Homo sapiens
ctgagccacacacaatggatagg

SEQ ID NO: 1140 - DNA, 23 bp, Homo sapiens
gggtaataggaatatgggatggg

SEQ ID NO: 1141 - DNA, 23 bp, Homo sapiens
atccacacactattttgaagagg

SEQ ID NO: 1142 - DNA, 23 bp, Homo sapiens
gggaaaaaacggattggagtggg

SEQ ID NO: 1143 - DNA, 23 bp, Homo sapiens
acatattttagtcaaatcagagg

SEQ ID NO: 1144 - DNA, 23 bp, Homo sapiens
gtgaaagcatttaaaaactgggg

SEQ ID NO: 1145 - DNA, 23 bp, Homo sapiens
gatatgtttaatcaaaaacatgg

SEQ ID NO: 1146 - DNA, 23 bp, Homo sapiens
aagtgtggaaagcactgggttgg

SEQ ID NO: 1147 - DNA, 23 bp, Homo sapiens
agaatgatctgcttaacacttgg

SEQ ID NO: 1148 - DNA, 23 bp, Homo sapiens
tttagctcctcaggctatggagg

SEQ ID NO: 1149 - DNA, 23 bp, Homo sapiens
atccttcctctcataaatgaggg

SEQ ID NO: 1150 - DNA, 23 bp, Homo sapiens
gtacaaatattacattaacatgg

SEQ ID NO: 1151 - DNA, 23 bp, Homo sapiens
gcatgtgttagatacaatgcagg

SEQ ID NO: 1152 - DNA, 23 bp, Homo sapiens
ttaggagtaattaccacggtggg

SEQ ID NO: 1153 - DNA, 23 bp, Homo sapiens
cgtgagtcagtaacccctgaagg

SEQ ID NO: 1154 - DNA, 23 bp, Homo sapiens
ggaaaatataagtcagagggagg

SEQ ID NO: 1155 - DNA, 23 bp, Homo sapiens
acattatgaggcaaataatgagg

SEQ ID NO: 1156 - DNA, 23 bp, Homo sapiens
gaatactggcctttactggaggg

SEQ ID NO: 1157 - DNA, 23 bp, Homo sapiens
gcaaaatgggtgtggtagcgagg

SEQ ID NO: 1158 - DNA, 23 bp, Homo sapiens
aattactaatgaatgttgggagg

SEQ ID NO: 1159 - DNA, 23 bp, Homo sapiens
atttctttaggagatactcatgg

SEQ ID NO: 1160 - DNA, 23 bp, Homo sapiens
ctccatatattctttcagtgtgg

SEQ ID NO: 1161 - DNA, 23 bp, Homo sapiens
tgtaacaagaaacaaagctaagg

SEQ ID NO: 1162 - DNA, 23 bp, Homo sapiens
aatgctgcatgtcatatacctgg

SEQ ID NO: 1163 - DNA, 23 bp, Homo sapiens
ataaactgcagacacttccacgg

SEQ ID NO: 1164 - DNA, 23 bp, Homo sapiens
gctaaaagccagtgagaagacgg

SEQ ID NO: 1165 - DNA, 23 bp, Homo sapiens
aatccagatgctaccacaggagg

SEQ ID NO: 1166 - DNA, 23 bp, Homo sapiens
tgaaaattgagagtagggaacgg

SEQ ID NO: 1167 - DNA, 23 bp, Homo sapiens
agcccttctcttaagtagcacgg

SEQ ID NO: 1168 - DNA, 23 bp, Homo sapiens
tgaaggttcaataaataggtcgg

SEQ ID NO: 1169 - DNA, 23 bp, Homo sapiens
cctctgactgtccatgagagagg

SEQ ID NO: 1170 - DNA, 23 bp, Homo sapiens
agcttcctagtggccacacaggg

SEQ ID NO: 1171 - DNA, 23 bp, Homo sapiens
aaaagcttcactgatcaagatgg

SEQ ID NO: 1172 - DNA, 23 bp, Homo sapiens
ccatattagaagcaagtccaagg

SEQ ID NO: 1173 - DNA, 23 bp, Homo sapiens
actgatcgtgttgctgacaaagg

SEQ ID NO: 1174 - DNA, 23 bp, Homo sapiens
cctaaatatacagtacatcaggg

SEQ ID NO: 1175 - DNA, 23 bp, Homo sapiens
aacttggaaataatttttagggg

SEQ ID NO: 1176 - DNA, 23 bp, Homo sapiens
ataatcactcacatttcccaagg

SEQ ID NO: 1177 - DNA, 23 bp, Homo sapiens
aaaataactttggtagacagtgg

SEQ ID NO: 1178 - DNA, 23 bp, Homo sapiens
attgtacctcacagcatagaggg

SEQ ID NO: 1179 - DNA, 23 bp, Homo sapiens
aacatattaactagcccccaagg

SEQ ID NO: 1180 - DNA, 23 bp, Homo sapiens
tttactagatcatcaccggcagg

SEQ ID NO: 1181 - DNA, 23 bp, Homo sapiens
acacagcacacacgaatgcatgg

SEQ ID NO: 1182 - DNA, 23 bp, Homo sapiens
tctctttttatagtggtgggggg

SEQ ID NO: 1183 - DNA, 23 bp, Homo sapiens
actccatccattagtaatcacgg

SEQ ID NO: 1184 - DNA, 23 bp, Homo sapiens
ataatacccacatcagtagaggg

SEQ ID NO: 1185 - DNA, 23 bp, Homo sapiens
agtattgtgttactagtagaggg

SEQ ID NO: 1186 - DNA, 23 bp, Homo sapiens
acagctagtttttttttcagggg

SEQ ID NO: 1187 - DNA, 23 bp, Homo sapiens
agaaaaatgaagtagagcaaagg

SEQ ID NO: 1188 - DNA, 23 bp, Homo sapiens
aatagactgctatcctgccatgg

SEQ ID NO: 1189 - DNA, 23 bp, Homo sapiens
tgagaggaaggatctgcgctagg

SEQ ID NO: 1190 - DNA, 23 bp, Homo sapiens
tcaatggagattggtgagagggg

SEQ ID NO: 1191 - DNA, 23 bp, Homo sapiens
aagtaagctgtcattacccaagg

SEQ ID NO: 1192 - DNA, 23 bp, Homo sapiens
gggaggactagttcttcctaagg

SEQ ID NO: 1193 - DNA, 23 bp, Homo sapiens
aatgtacaaaaaaaatacaatgg

SEQ ID NO: 1194 - DNA, 23 bp, Homo sapiens
tttttgctaggagagaaaagtgg

SEQ ID NO: 1195 - DNA, 23 bp, Homo sapiens
tgatgtggtggataacagcaagg

SEQ ID NO: 1196 - DNA, 23 bp, Homo sapiens
attgatagcaagatttcaagggg

SEQ ID NO: 1197 - DNA, 23 bp, Homo sapiens
aattactccaagaaatgtgtagg

SEQ ID NO: 1198 - DNA, 23 bp, Homo sapiens
gtagctaaaaagtcttgtagagg

SEQ ID NO: 1199 - DNA, 23 bp, Homo sapiens
gcataattctcaaaaagaggggg

SEQ ID NO: 1200 - DNA, 23 bp, Homo sapiens
agaactaatccttttcaccatgg

SEQ ID NO: 1201 - DNA, 23 bp, Homo sapiens
tagagccatgcaaatgagagtgg

SEQ ID NO: 1202 - DNA, 23 bp, Homo sapiens
gattcccaaaagtaagtgaaggg

SEQ ID NO: 1203 - DNA, 23 bp, Homo sapiens
attcggaacacagttgagagagg

SEQ ID NO: 1204 - DNA, 23 bp, Homo sapiens
gagtatggctaataattcaaagg

SEQ ID NO: 1205 - DNA, 23 bp, Homo sapiens
agtcatccaaatatatcccaggg

SEQ ID NO: 1206 - DNA, 23 bp, Homo sapiens
catgtgcatattaataagagagg

SEQ ID NO: 1207 - DNA, 23 bp, Homo sapiens
ccctcaatcccaattctgcaggg

SEQ ID NO: 1208 - DNA, 23 bp, Homo sapiens
agtggagaaaggcatctctaggg

SEQ ID NO: 1209 - DNA, 23 bp, Homo sapiens
aaaagcttaaagctaacggaggg

SEQ ID NO: 1210 - DNA, 23 bp, Homo sapiens
gcagtagtagtagttgtactggg

SEQ ID NO: 1211 - DNA, 23 bp, Homo sapiens
ctgtgcattggcagtgacagcgg

SEQ ID NO: 1212 - DNA, 23 bp, Homo sapiens
gtttaaatgcacaatgccaaggg

SEQ ID NO: 1213 - DNA, 23 bp, Homo sapiens
gtcaaagtagcatcttgctgtgg

SEQ ID NO: 1214 - DNA, 23 bp, Homo sapiens
aaatatccatctttgtggcaggg

SEQ ID NO: 1215 - DNA, 23 bp, Homo sapiens
gatactgcatggaactcgggtgg

SEQ ID NO: 1216 - DNA, 23 bp, Homo sapiens
atgcagcagctgaattctgaagg

SEQ ID NO: 1217 - DNA, 23 bp, Homo sapiens
gttgtaacaggagaggagctggg

SEQ ID NO: 1218 - DNA, 23 bp, Homo sapiens
tcacactgagagtaccgctcagg

SEQ ID NO: 1219 - DNA, 23 bp, Homo sapiens
tattatagctcaatttcaccagg

SEQ ID NO: 1220 - DNA, 23 bp, Homo sapiens
ttattctaaaatagatatgaggg

SEQ ID NO: 1221 - DNA, 23 bp, Homo sapiens
aagtatttcataatctctagagg

SEQ ID NO: 1222 - DNA, 23 bp, Homo sapiens
tcaagaccggtgtggtgaagcgg

SEQ ID NO: 1223 - DNA, 23 bp, Homo sapiens
gcaagctggcagtctttcaaggg

SEQ ID NO: 1224 - DNA, 23 bp, Homo sapiens
gaagctttcctcataactgtagg

SEQ ID NO: 1225 - DNA, 23 bp, Homo sapiens
tagtcacttgctcttccttgcgg

SEQ ID NO: 1226 - DNA, 23 bp, Homo sapiens
ccatgccatccacccaaccatgg

SEQ ID NO: 1227 - DNA, 23 bp, Homo sapiens
cagggccatcagctgcctgaagg

SEQ ID NO: 1228 - DNA, 23 bp, Homo sapiens
ggccagtgcagaacacacctggg

SEQ ID NO: 1229 - DNA, 23 bp, Homo sapiens
gcaatggtttcttccctcaccgg

SEQ ID NO: 1230 - DNA, 23 bp, Homo sapiens
gtacagaagtagatcatggaagg

SEQ ID NO: 1231 - DNA, 23 bp, Homo sapiens
aacaagcttactgatatagaggg

SEQ ID NO: 1232 - DNA, 23 bp, Homo sapiens
ggcgaaagaatcactgagagtgg

SEQ ID NO: 1233 - DNA, 23 bp, Homo sapiens
agccaggctacggagcagctcgg

SEQ ID NO: 1234 - DNA, 23 bp, Homo sapiens
ttgcctctcatatttacagaggg

SEQ ID NO: 1235 - DNA, 23 bp, Homo sapiens
tatcattacaaatatatgcatgg

SEQ ID NO: 1236 - DNA, 23 bp, Homo sapiens
tagccaagcacagataaagcagg

SEQ ID NO: 1237 - DNA, 23 bp, Homo sapiens
agtttatctcctaaatatgaggg

SEQ ID NO: 1238 - DNA, 23 bp, Homo sapiens
aacaattgaggagccctacaggg

SEQ ID NO: 1239 - DNA, 23 bp, Homo sapiens
accctccccacacccccacacgg

SEQ ID NO: 1240 - DNA, 23 bp, Homo sapiens
attttactaatagtgacaagagg

SEQ ID NO: 1241 - DNA, 23 bp, Homo sapiens
ttatttgcttgttaccctagtgg

SEQ ID NO: 1242 - DNA, 23 bp, Homo sapiens
tgtgcctatcctaataagcaggg

SEQ ID NO: 1243 - DNA, 23 bp, Homo sapiens
aaggtctctaaagatagcatagg

SEQ ID NO: 1244 - DNA, 23 bp, Homo sapiens
agagaattgcaaaatgggtgtgg

SEQ ID NO: 1245 - DNA, 23 bp, Homo sapiens
atacatctactgctaatgatggg

SEQ ID NO: 1246 - DNA, 23 bp, Homo sapiens
agttacatattaaacagctaagg

SEQ ID NO: 1247 - DNA, 23 bp, Homo sapiens
tagttcaaagggggataggacgg

SEQ ID NO: 1248 - DNA, 23 bp, Homo sapiens
aagtctatatcaaaatatagggg

SEQ ID NO: 1249 - DNA, 23 bp, Homo sapiens
gctaagttcaagtgaagtagagg

SEQ ID NO: 1250 - DNA, 23 bp, Homo sapiens
ctatgtagccgaaagttccaagg

SEQ ID NO: 1251 - DNA, 23 bp, Homo sapiens
aagatggcattgttaggtggtgg

SEQ ID NO: 1252 - DNA, 23 bp, Homo sapiens
agaaggtcatggaagttaggagg

SEQ ID NO: 1253 - DNA, 23 bp, Homo sapiens
agatatgtgcggctaacacaggg

SEQ ID NO: 1254 - DNA, 23 bp, Homo sapiens
ccattctctagacttgcataggg

SEQ ID NO: 1255 - DNA, 23 bp, Homo sapiens
ttactttgtcagtacttcagggg

SEQ ID NO: 1256 - DNA, 23 bp, Homo sapiens
gtactagccatcaaaatttgggg

SEQ ID NO: 1257 - DNA, 23 bp, Homo sapiens
gattcatgcaaaactagactagg

SEQ ID NO: 1258 - DNA, 23 bp, Homo sapiens
gccctcctttgtaacctctgagg

SEQ ID NO: 1259 - DNA, 23 bp, Homo sapiens
cataaaatctaccagtaggtggg

SEQ ID NO: 1260 - DNA, 23 bp, Homo sapiens
agtgcaacatgattggacatagg

SEQ ID NO: 1261 - DNA, 23 bp, Homo sapiens
gctttagaaccaaaagtcgatgg

SEQ ID NO: 1262 - DNA, 23 bp, Homo sapiens
gacctcagaggttacaaaggagg

SEQ ID NO: 1263 - DNA, 23 bp, Homo sapiens
attgctgtgctagattacactgg

SEQ ID NO: 1264 - DNA, 23 bp, Homo sapiens
tcagctttgtaactcctcaaagg

SEQ ID NO: 1265 - DNA, 23 bp, Homo sapiens
ttagtgaacgtatttcaacttgg

SEQ ID NO: 1266 - DNA, 23 bp, Homo sapiens
accttaaaacaagttacagaggg

SEQ ID NO: 1267 - DNA, 23 bp, Homo sapiens
cttgcatcagtttctaaacgagg

SEQ ID NO: 1268 - DNA, 23 bp, Homo sapiens
atgatgccttgagtgtggctggg

SEQ ID NO: 1269 - DNA, 23 bp, Homo sapiens
aacaaagcccagaagaatgaggg

SEQ ID NO: 1270 - DNA, 23 bp, Homo sapiens
gaactcaaggttttcaacaaggg

SEQ ID NO: 1271 - DNA, 23 bp, Homo sapiens
acattgaatggcaagtccaaagg

SEQ ID NO: 1272 - DNA, 23 bp, Homo sapiens
aatggctgcatgataattagtgg

SEQ ID NO: 1273 - DNA, 23 bp, Homo sapiens
agcttccttttacatccaagagg

SEQ ID NO: 1274 - DNA, 23 bp, Homo sapiens
tagggcttacttatgatgcaagg

SEQ ID NO: 1275 - DNA, 23 bp, Homo sapiens
ttggcttagaaaacatgagtggg

SEQ ID NO: 1276 - DNA, 23 bp, Homo sapiens
ttatgaatacaaagagctaaggg

SEQ ID NO: 1277 - DNA, 23 bp, Homo sapiens
aataattgtagtagaaaccaagg

SEQ ID NO: 1278 - DNA, 23 bp, Homo sapiens
aatgggagaaatccaagcatagg

SEQ ID NO: 1279 - DNA, 23 bp, Homo sapiens
acatcttgaatgaaaacaagagg

SEQ ID NO: 1280 - DNA, 23 bp, Homo sapiens
actcctaaccctttagccaaagg

SEQ ID NO: 1281 - DNA, 23 bp, Homo sapiens
cttaactctctgttgtgaggggg

SEQ ID NO: 1282 - DNA, 23 bp, Homo sapiens
ttagtagacgctgaagggcaggg

SEQ ID NO: 1283 - DNA, 23 bp, Homo sapiens
cctctttgagcagagatcaaggg

SEQ ID NO: 1284 - DNA, 23 bp, Homo sapiens
ctaagcccgtgtctatgaagtgg

SEQ ID NO: 1285 - DNA, 23 bp, Homo sapiens
tttaaatactgaagttcacatgg

SEQ ID NO: 1286 - DNA, 23 bp, Homo sapiens
tctgccaaaagctcaatatgagg

SEQ ID NO: 1287 - DNA, 23 bp, Homo sapiens
tgcacagacatcttacaacatgg

SEQ ID NO: 1288 - DNA, 23 bp, Homo sapiens
agacatttcaaattctgcggagg

SEQ ID NO: 1289 - DNA, 23 bp, Homo sapiens
ctgtaactggagacaagaagggg

SEQ ID NO: 1290 - DNA, 23 bp, Homo sapiens
catagggaggaatcccacaatgg

SEQ ID NO: 1291 - DNA, 23 bp, Homo sapiens
ggctggttaaaagctttcagagg

SEQ ID NO: 1292 - DNA, 23 bp, Homo sapiens
gccactgttcattttaactgggg

SEQ ID NO: 1293 - DNA, 23 bp, Homo sapiens
ccataaaaagaatggtacaatgg

SEQ ID NO: 1294 - DNA, 23 bp, Homo sapiens
agaggaaaggaggtgacctaggg

SEQ ID NO: 1295 - DNA, 23 bp, Homo sapiens
actaattaatacttgccagtcgg

SEQ ID NO: 1296 - DNA, 23 bp, Homo sapiens
gttcaatcctatgataatcaggg

SEQ ID NO: 1297 - DNA, 23 bp, Homo sapiens
aactcacaaatattgttgcaggg

SEQ ID NO: 1298 - DNA, 23 bp, Homo sapiens
gaaatggcttcggagatacatgg

SEQ ID NO: 1299 - DNA, 23 bp, Homo sapiens
aatcaggacagtaatttggtagg

SEQ ID NO: 1300 - DNA, 23 bp, Homo sapiens
ttgtttgagtaacctagctgagg

SEQ ID NO: 1301 - DNA, 23 bp, Homo sapiens
cctccaacaatagctcaagcagg

SEQ ID NO: 1302 - DNA, 23 bp, Homo sapiens
gtgagttattgtaatagcaatgg

SEQ ID NO: 1303 - DNA, 23 bp, Homo sapiens
acattctgtttttatcccagtgg

SEQ ID NO: 1304 - DNA, 23 bp, Homo sapiens
gcatctacatactctaacatggg

SEQ ID NO: 1305 - DNA, 23 bp, Homo sapiens
tggaggcctacaacctctgaagg

SEQ ID NO: 1306 - DNA, 23 bp, Homo sapiens
ggaaccattagtacttacaatgg

SEQ ID NO: 1307 - DNA, 23 bp, Homo sapiens
gaacatttaatatataggaatgg

SEQ ID NO: 1308 - DNA, 23 bp, Homo sapiens
aaaccagtattttcaaagcgtgg

SEQ ID NO: 1309 - DNA, 23 bp, Homo sapiens
tcggatgctggccataaacaggg

SEQ ID NO: 1310 - DNA, 23 bp, Homo sapiens
ggaggtagcagcaataagctggg

SEQ ID NO: 1311 - DNA, 23 bp, Homo sapiens
acaaattccaataaatgatgagg

SEQ ID NO: 1312 - DNA, 23 bp, Homo sapiens
aagcccttgaagaggagttgagg

SEQ ID NO: 1313 - DNA, 23 bp, Homo sapiens
acatgggcaacaaattagatggg

SEQ ID NO: 1314 - DNA, 23 bp, Homo sapiens
gctgctcaggaacatcctcatgg

SEQ ID NO: 1315 - DNA, 23 bp, Homo sapiens
ggattcccaaaagtaagtgaagg

SEQ ID NO: 1316 - DNA, 23 bp, Homo sapiens
tgccagcatatgtagtaagtagg

SEQ ID NO: 1317 - DNA, 23 bp, Homo sapiens
tatccttcacctctctcaagagg

SEQ ID NO: 1318 - DNA, 23 bp, Homo sapiens
gctgggaatagaagatgtcaggg

SEQ ID NO: 1319 - DNA, 23 bp, Homo sapiens
agactattaagaagaactcaagg

SEQ ID NO: 1320 - DNA, 23 bp, Homo sapiens
atgtaaactaataaaaacgttgg

SEQ ID NO: 1321 - DNA, 23 bp, Homo sapiens
gttgatatgctaaataaaagggg

SEQ ID NO: 1322 - DNA, 23 bp, Homo sapiens
aatttattcagtatgtcaccagg

SEQ ID NO: 1323 - DNA, 23 bp, Homo sapiens
tagactaaattcaaagactgagg

SEQ ID NO: 1324 - DNA, 23 bp, Homo sapiens
atcatgaccttacaagaggaagg

SEQ ID NO: 1325 - DNA, 23 bp, Homo sapiens
tgatttttcattgaactcagagg

SEQ ID NO: 1326 - DNA, 23 bp, Homo sapiens
gtagacatctcactgctcatggg

SEQ ID NO: 1327 - DNA, 23 bp, Homo sapiens
gaaagaagtggcgtttgcagtgg

SEQ ID NO: 1328 - DNA, 23 bp, Homo sapiens
atacaaaacaaaacatgagaggg

SEQ ID NO: 1329 - DNA, 23 bp, Homo sapiens
gtctattcattcaggctaagggg

SEQ ID NO: 1330 - DNA, 23 bp, Homo sapiens
tgtatttataaacaaccctaagg

SEQ ID NO: 1331 - DNA, 23 bp, Homo sapiens
tggggagaggaattggtaagggg

SEQ ID NO: 1332 - DNA, 23 bp, Homo sapiens
tcttgtacatcttaacctcaagg

SEQ ID NO: 1333 - DNA, 23 bp, Homo sapiens
tagccaccttctgtatcagaagg

SEQ ID NO: 1334 - DNA, 23 bp, Homo sapiens
ttccgatgatcctttaactgtgg

SEQ ID NO: 1335 - DNA, 23 bp, Homo sapiens
atgaagagacaagctttccaggg

SEQ ID NO: 1336 - DNA, 23 bp, Homo sapiens
gcattgagcacactctacaaggg

SEQ ID NO: 1337 - DNA, 23 bp, Homo sapiens
cacaggagctctaagtccagtgg

SEQ ID NO: 1338 - DNA, 23 bp, Homo sapiens
ggaaaacaaggtaaagtgagtgg

SEQ ID NO: 1339 - DNA, 23 bp, Homo sapiens
ggtgaccacagtttaaagaaggg

SEQ ID NO: 1340 - DNA, 23 bp, Homo sapiens
acggtgttatctttaaaacctgg

SEQ ID NO: 1341 - DNA, 23 bp, Homo sapiens
gacaagcagaacaatttcaaggg

SEQ ID NO: 1342 - DNA, 23 bp, Homo sapiens
ctaagggaacatcttgctgtagg

SEQ ID NO: 1343 - DNA, 23 bp, Homo sapiens
tggatcagaattgaaactgaggg

SEQ ID NO: 1344 - DNA, 23 bp, Homo sapiens
aagatgtgagctataaaagaggg

SEQ ID NO: 1345 - DNA, 23 bp, Homo sapiens
gcctgaaattggtaagaggacgg

SEQ ID NO: 1346 - DNA, 23 bp, Homo sapiens
caagtttcctccctagaggaggg

SEQ ID NO: 1347 - DNA, 23 bp, Homo sapiens
tatgttgcaatttgaagacaggg

SEQ ID NO: 1348 - DNA, 23 bp, Homo sapiens
aattccaagggacttttgagggg

SEQ ID NO: 1349 - DNA, 23 bp, Homo sapiens
gatacagtgaattcacagcttgg

SEQ ID NO: 1350 - DNA, 23 bp, Homo sapiens
ctgttcagtaagtgtctgcaggg

SEQ ID NO: 1351 - DNA, 23 bp, Homo sapiens
aagtcaacaacatacatggatgg

SEQ ID NO: 1352 - DNA, 23 bp, Homo sapiens
tcttgtgcgtgctaaagcatagg

SEQ ID NO: 1353 - DNA, 23 bp, Homo sapiens
caaaacaaaagccaagaagaggg

SEQ ID NO: 1354 - DNA, 23 bp, Homo sapiens
tgcccagtggtgggtcagagggg

SEQ ID NO: 1355 - DNA, 23 bp, Homo sapiens
ccaaaattgatagaaaacattgg

SEQ ID NO: 1356 - DNA, 23 bp, Homo sapiens
taatatgctgtaatatatgaggg

SEQ ID NO: 1357 - DNA, 23 bp, Homo sapiens
gataatatcaaagactcttgggg

SEQ ID NO: 1358 - DNA, 23 bp, Homo sapiens
gtcactactagagtatgcactgg

SEQ ID NO: 1359 - DNA, 23 bp, Homo sapiens
gccataggccatctccatagtgg

SEQ ID NO: 1360 - DNA, 23 bp, Homo sapiens
cacctcttcaaaatagtgtgtgg

SEQ ID NO: 1361 - DNA, 23 bp, Homo sapiens
acacatatgtatatatcagaagg

SEQ ID NO: 1362 - DNA, 23 bp, Homo sapiens
tttctataatctattgccaaggg

SEQ ID NO: 1363 - DNA, 23 bp, Homo sapiens
ataagaacatacatagccaaagg

SEQ ID NO: 1364 - DNA, 23 bp, Homo sapiens
gctttgtgaaacaattggcaagg

SEQ ID NO: 1365 - DNA, 23 bp, Homo sapiens
actccatcagagagttctgtagg

SEQ ID NO: 1366 - DNA, 23 bp, Homo sapiens
aggatagcttacttatacagggg

SEQ ID NO: 1367 - DNA, 23 bp, Homo sapiens
ctttgttacatttagaaccacgg

SEQ ID NO: 1368 - DNA, 23 bp, Homo sapiens
ttttcccacttcatagacacggg

SEQ ID NO: 1369 - DNA, 23 bp, Homo sapiens
atgaagttctacattgaactggg

SEQ ID NO: 1370 - DNA, 23 bp, Homo sapiens
tttaaatgatatttccttggggg

SEQ ID NO: 1371 - DNA, 23 bp, Homo sapiens
cagaagttactgacttgaggagg

SEQ ID NO: 1372 - DNA, 23 bp, Homo sapiens
tctgtactaagatcggtgacagg

SEQ ID NO: 1373 - DNA, 23 bp, Homo sapiens
taatacaaagaaattgcaagtgg

SEQ ID NO: 1374 - DNA, 23 bp, Homo sapiens
tgagagatgagcaaatagcctgg

SEQ ID NO: 1375 - DNA, 23 bp, Homo sapiens
gggctgaagcccatgctgagggg

SEQ ID NO: 1376 - DNA, 23 bp, Homo sapiens
tgaacaggaggtggatcgaaagg

SEQ ID NO: 1377 - DNA, 23 bp, Homo sapiens
ttcaggaaaatataagtcagagg

SEQ ID NO: 1378 - DNA, 23 bp, Homo sapiens
tttaacatcagaaagaacgttgg

SEQ ID NO: 1379 - DNA, 23 bp, Homo sapiens
atagagaatttttaacacctagg

SEQ ID NO: 1380 - DNA, 23 bp, Homo sapiens
gtggaggcaaaggaacagacagg

SEQ ID NO: 1381 - DNA, 23 bp, Homo sapiens
tcaacacagtaactgatgccagg

SEQ ID NO: 1382 - DNA, 23 bp, Homo sapiens
agaactctgctcaagctgaaagg

SEQ ID NO: 1383 - DNA, 23 bp, Homo sapiens
cacataataatactatctaaggg

SEQ ID NO: 1384 - DNA, 23 bp, Homo sapiens
ataaacaaatacatatctaaggg

SEQ ID NO: 1385 - DNA, 23 bp, Homo sapiens
tgtttgttgccaggaaacacagg

SEQ ID NO: 1386 - DNA, 23 bp, Homo sapiens
attttggtaaaatatggtgaagg

SEQ ID NO: 1387 - DNA, 23 bp, Homo sapiens
ggagcttgcaaagggactgtagg

SEQ ID NO: 1388 - DNA, 23 bp, Homo sapiens
ttattgttggctttaaaaggggg

SEQ ID NO: 1389 - DNA, 23 bp, Homo sapiens
tagaataaatctgagctaggagg

SEQ ID NO: 1390 - DNA, 23 bp, Homo sapiens
atctcatacaccttttgctgggg

SEQ ID NO: 1391 - DNA, 23 bp, Homo sapiens
ccaaagccagtttacttctgggg

SEQ ID NO: 1392 - DNA, 23 bp, Homo sapiens
ctcttactcatagtgataagggg

SEQ ID NO: 1393 - DNA, 23 bp, Homo sapiens
attgttctgataacccaagaggg

SEQ ID NO: 1394 - DNA, 23 bp, Homo sapiens
aagttccatgtcctagctcgagg

SEQ ID NO: 1395 - DNA, 23 bp, Homo sapiens
cccaattgtactgtgcagcatgg

SEQ ID NO: 1396 - DNA, 23 bp, Homo sapiens
tcattaaattggagatcgaaagg

SEQ ID NO: 1397 - DNA, 23 bp, Homo sapiens
ggagcttccactaggccagaggg

SEQ ID NO: 1398 - DNA, 23 bp, Homo sapiens
tacagtagtcagttgaaatgggg

SEQ ID NO: 1399 - DNA, 23 bp, Homo sapiens
tagctggtagattaaagcaaagg

SEQ ID NO: 1400 - DNA, 23 bp, Homo sapiens
tttcaaatagaagctaagaaggg

SEQ ID NO: 1401 - DNA, 23 bp, Homo sapiens
acaagtttcctccctagaggagg

SEQ ID NO: 1402 - DNA, 23 bp, Homo sapiens
gtatgtgctagcgtggatgatgg

SEQ ID NO: 1403 - DNA, 23 bp, Homo sapiens
atttctggttcatataaaggtgg

SEQ ID NO: 1404 - DNA, 23 bp, Homo sapiens
ccctttcactggtattagggagg

SEQ ID NO: 1405 - DNA, 23 bp, Homo sapiens
ctgagggtgggaaaatgccatgg

SEQ ID NO: 1406 - DNA, 23 bp, Homo sapiens
tttatactaactatgggtggggg

SEQ ID NO: 1407 - DNA, 23 bp, Homo sapiens
aacactatctggctgcctgaggg

SEQ ID NO: 1408 - DNA, 23 bp, Homo sapiens
gtctatcactcaaggtacaaagg

SEQ ID NO: 1409 - DNA, 23 bp, Homo sapiens
gtgtagaaaccattctgccaggg

SEQ ID NO: 1410 - DNA, 23 bp, Homo sapiens
ttattcacccttgtcaacaaagg

SEQ ID NO: 1411 - DNA, 23 bp, Homo sapiens
tattattttttacattctggagg

SEQ ID NO: 1412 - DNA, 23 bp, Homo sapiens
ctatcctaataagcaggggatgg

SEQ ID NO: 1413 - DNA, 23 bp, Homo sapiens
tcagacctcagaggttacaaagg

SEQ ID NO: 1414 - DNA, 23 bp, Homo sapiens
caaggaagttcagagatgtaggg

SEQ ID NO: 1415 - DNA, 23 bp, Homo sapiens
gtactcaatcctttgatggaagg

SEQ ID NO: 1416 - DNA, 23 bp, Homo sapiens
tgagagaggccagacttgcaggg

SEQ ID NO: 1417 - DNA, 23 bp, Homo sapiens
gaaatgtgtacaaagttaggagg

SEQ ID NO: 1418 - DNA, 23 bp, Homo sapiens
actacatccataatcagagaagg

SEQ ID NO: 1419 - DNA, 23 bp, Homo sapiens
tcacattccaaacccagcctagg

SEQ ID NO: 1420 - DNA, 23 bp, Homo sapiens
tgttaattggaggttgacaaggg

SEQ ID NO: 1421 - DNA, 23 bp, Homo sapiens
ttatatgctttgatcagatgggg

SEQ ID NO: 1422 - DNA, 23 bp, Homo sapiens
atcttgctgtaggcagcctgggg

SEQ ID NO: 1423 - DNA, 23 bp, Homo sapiens
ccactgttcattttaactggggg

SEQ ID NO: 1424 - DNA, 23 bp, Homo sapiens
aaagtaacattggccaaagaggg

SEQ ID NO: 1425 - DNA, 23 bp, Homo sapiens
tttcatttggagagaacaggagg

SEQ ID NO: 1426 - DNA, 23 bp, Homo sapiens
ttgattgataagttatgccaggg

SEQ ID NO: 1427 - DNA, 23 bp, Homo sapiens
agaggagatattaccccagaagg

SEQ ID NO: 1428 - DNA, 23 bp, Homo sapiens
ttggggagaggaattggtaaggg

SEQ ID NO: 1429 - DNA, 23 bp, Homo sapiens
ctactgaaatcatacactaacgg

SEQ ID NO: 1430 - DNA, 23 bp, Homo sapiens
atcatactctaattcacagaagg

SEQ ID NO: 1431 - DNA, 23 bp, Homo sapiens
ttaggaatatggagcaatgaggg

SEQ ID NO: 1432 - DNA, 23 bp, Homo sapiens
atttaaaccacagttctcaaagg

SEQ ID NO: 1433 - DNA, 23 bp, Homo sapiens
tattcccttctcaacagcctagg

SEQ ID NO: 1434 - DNA, 23 bp, Homo sapiens
tgcagcctaacagataaagatgg

SEQ ID NO: 1435 - DNA, 23 bp, Homo sapiens
tgatggacacattagtgagtagg

SEQ ID NO: 1436 - DNA, 23 bp, Homo sapiens
ttgaagatgggcgcttccaaagg

SEQ ID NO: 1437 - DNA, 23 bp, Homo sapiens
tttcacagcaatacattttgggg

SEQ ID NO: 1438 - DNA, 23 bp, Homo sapiens
taccacagttaaaggatcatcgg

SEQ ID NO: 1439 - DNA, 23 bp, Homo sapiens
aatgtattagtactgttgtgtgg

SEQ ID NO: 1440 - DNA, 23 bp, Homo sapiens
acttaacaattattatctagggg

SEQ ID NO: 1441 - DNA, 23 bp, Homo sapiens
ctaatgtgtccatcacatgcagg

SEQ ID NO: 1442 - DNA, 23 bp, Homo sapiens
gaccatctctacatacagaatgg

SEQ ID NO: 1443 - DNA, 23 bp, Homo sapiens
acatctaagatatcccaatacgg

SEQ ID NO: 1444 - DNA, 23 bp, Homo sapiens
ttacgccttttagaagaggaggg

SEQ ID NO: 1445 - DNA, 23 bp, Homo sapiens
tatgcaaattaatttttcagtgg

SEQ ID NO: 1446 - DNA, 23 bp, Homo sapiens
tttttgaaagaaggactagtcgg

SEQ ID NO: 1447 - DNA, 23 bp, Homo sapiens
tctgaagactggctagactaggg

SEQ ID NO: 1448 - DNA, 23 bp, Homo sapiens
ggaggtattgtactttgccaagg

SEQ ID NO: 1449 - DNA, 23 bp, Homo sapiens
ccaaaatctaacgcagcacaagg

SEQ ID NO: 1450 - DNA, 23 bp, Homo sapiens
ggagagagagacatgtaccttgg

SEQ ID NO: 1451 - DNA, 23 bp, Homo sapiens
cttttggttaaagagtaatgagg

SEQ ID NO: 1452 - DNA, 23 bp, Homo sapiens
ttgcaaattgttatagaccaagg

SEQ ID NO: 1453 - DNA, 23 bp, Homo sapiens
ccatatgtcattattagctgcgg

SEQ ID NO: 1454 - DNA, 23 bp, Homo sapiens
gtcttgtgcagtattagtagtgg

SEQ ID NO: 1455 - DNA, 23 bp, Homo sapiens
gatattgtaggcatattcgatgg

SEQ ID NO: 1456 - DNA, 23 bp, Homo sapiens
tgcctaccaagagaagaagaggg

SEQ ID NO: 1457 - DNA, 23 bp, Homo sapiens
tctgctcagatcattcaaaaggg

SEQ ID NO: 1458 - DNA, 23 bp, Homo sapiens
actcaattaactattcagactgg

SEQ ID NO: 1459 - DNA, 23 bp, Homo sapiens
ccacagggacagaagtaagcggg

SEQ ID NO: 1460 - DNA, 23 bp, Homo sapiens
aagtgattacaccttgtactggg

SEQ ID NO: 1461 - DNA, 23 bp, Homo sapiens
atacctactcctctttgctaagg

SEQ ID NO: 1462 - DNA, 23 bp, Homo sapiens
tatctgagctgttacaaaagtgg

SEQ ID NO: 1463 - DNA, 23 bp, Homo sapiens
gggtttctggagaccgagaaggg

SEQ ID NO: 1464 - DNA, 23 bp, Homo sapiens
tctacatcacgataatatgttgg

SEQ ID NO: 1465 - DNA, 23 bp, Homo sapiens
taacttccattgcctatcagtgg

SEQ ID NO: 1466 - DNA, 23 bp, Homo sapiens
gtcttcttttaaaaatacaaagg

SEQ ID NO: 1467 - DNA, 23 bp, Homo sapiens
ggaattatcatctcagccgcagg

SEQ ID NO: 1468 - DNA, 23 bp, Homo sapiens
cacttgctcttccttgcggtagg

SEQ ID NO: 1469 - DNA, 23 bp, Homo sapiens
acctgtttactacaaatcaaagg

SEQ ID NO: 1470 - DNA, 23 bp, Homo sapiens
ttttaaggcattctgtagtgagg

SEQ ID NO: 1471 - DNA, 23 bp, Homo sapiens
tttctcgtgttcaagaggcatgg

SEQ ID NO: 1472 - DNA, 23 bp, Homo sapiens
tatttattataggatgtgaaagg

SEQ ID NO: 1473 - DNA, 23 bp, Homo sapiens
acccacatcagtagagggcatgg

SEQ ID NO: 1474 - DNA, 23 bp, Homo sapiens
gctgacacaactttgtccccagg

SEQ ID NO: 1475 - DNA, 23 bp, Homo sapiens
ttaaattcaagtctctcgaaagg

SEQ ID NO: 1476 - DNA, 23 bp, Homo sapiens
cagcagtcctcagtaactcaggg

SEQ ID NO: 1477 - DNA, 23 bp, Homo sapiens
atgtatgtgtgcgtgtacatagg

SEQ ID NO: 1478 - DNA, 23 bp, Homo sapiens
atacaggtttaaatattgcatgg

SEQ ID NO: 1479 - DNA, 23 bp, Homo sapiens
ttcggaacacagttgagagaggg

SEQ ID NO: 1480 - DNA, 23 bp, Homo sapiens
aataatctttatcaccactaggg

SEQ ID NO: 1481 - DNA, 23 bp, Homo sapiens
agggaggagatatcaaaagatgg

SEQ ID NO: 1482 - DNA, 23 bp, Homo sapiens
ctgaggactagatggcagaatgg

SEQ ID NO: 1483 - DNA, 23 bp, Homo sapiens
atatgactgaacttaaaggctgg

SEQ ID NO: 1484 - DNA, 23 bp, Homo sapiens
tgttccttccagaggtgtgtggg

SEQ ID NO: 1485 - DNA, 23 bp, Homo sapiens
tacacctgcttttagaacagtgg

SEQ ID NO: 1486 - DNA, 23 bp, Homo sapiens
atataattgagaattagtgcagg

SEQ ID NO: 1487 - DNA, 23 bp, Homo sapiens
ataaggaccagaaggtgaagtgg

SEQ ID NO: 1488 - DNA, 23 bp, Homo sapiens
gagtattgtgttactagtagagg

SEQ ID NO: 1489 - DNA, 23 bp, Homo sapiens
ttttaatatctaattcaacatgg

SEQ ID NO: 1490 - DNA, 23 bp, Homo sapiens
actaatcttaggaagctggctgg

SEQ ID NO: 1491 - DNA, 23 bp, Homo sapiens
ggaattttacaccaggtcgaagg

SEQ ID NO: 1492 - DNA, 23 bp, Homo sapiens
gcctgtcagcgatactacctggg

SEQ ID NO: 1493 - DNA, 23 bp, Homo sapiens
ataccaggaatctcagtcatggg

SEQ ID NO: 1494 - DNA, 23 bp, Homo sapiens
tagagggctgataataaccttgg

SEQ ID NO: 1495 - DNA, 23 bp, Homo sapiens
gcatcttgaatttttaaaggagg

SEQ ID NO: 1496 - DNA, 23 bp, Homo sapiens
atattgacaagggaatgaaatgg

SEQ ID NO: 1497 - DNA, 23 bp, Homo sapiens
aattctaagcataaagctgaggg

SEQ ID NO: 1498 - DNA, 23 bp, Homo sapiens
ccacagatatattcctaggaggg

SEQ ID NO: 1499 - DNA, 23 bp, Homo sapiens
ttaacgttataatttttacaagg

SEQ ID NO: 1500 - DNA, 23 bp, Homo sapiens
aaaagcttcggcttcatacgtgg

SEQ ID NO: 1501 - DNA, 23 bp, Homo sapiens
ggtatgatagttaccctacatgg

SEQ ID NO: 1502 - DNA, 23 bp, Homo sapiens
agagttactctcccattcgaagg

SEQ ID NO: 1503 - DNA, 23 bp, Homo sapiens
tttccatctctcattcagatggg

SEQ ID NO: 1504 - DNA, 23 bp, Homo sapiens
tgaatcctgctttttcaaggtgg

SEQ ID NO: 1505 - DNA, 23 bp, Homo sapiens
atcagttcctccacaacatgtgg

SEQ ID NO: 1506 - DNA, 23 bp, Homo sapiens
acaaaaaaaaaaaaaaacaatgg

SEQ ID NO: 1507 - DNA, 23 bp, Homo sapiens
cggatcatgatgaaagccacagg

SEQ ID NO: 1508 - DNA, 23 bp, Homo sapiens
tcaaactcagttaatggaggcgg

SEQ ID NO: 1509 - DNA, 23 bp, Homo sapiens
tttgaagtgatttaatctagagg

SEQ ID NO: 1510 - DNA, 23 bp, Homo sapiens
ataaaaagcaaagagaacatagg

SEQ ID NO: 1511 - DNA, 23 bp, Homo sapiens
aattagtctataggataaggtgg

SEQ ID NO: 1512 - DNA, 23 bp, Homo sapiens
agacagagtctgggtccccatgg

SEQ ID NO: 1513 - DNA, 23 bp, Homo sapiens
gaaaaccatatacaaagcatagg

SEQ ID NO: 1514 - DNA, 23 bp, Homo sapiens
cattcaaaaatacatgaacaggg

SEQ ID NO: 1515 - DNA, 23 bp, Homo sapiens
gataggagaatatagactgtagg

SEQ ID NO: 1516 - DNA, 23 bp, Homo sapiens
tgaaattgtatgggttttagggg

SEQ ID NO: 1517 - DNA, 23 bp, Homo sapiens
tatatacataatataagccatgg

SEQ ID NO: 1518 - DNA, 23 bp, Homo sapiens
aaacagggtttaataggtgaggg

SEQ ID NO: 1519 - DNA, 23 bp, Homo sapiens
gaataggaaaagaacaactaggg

SEQ ID NO: 1520 - DNA, 23 bp, Homo sapiens
tgcttttcaaaggtgtgtggagg

SEQ ID NO: 1521 - DNA, 23 bp, Homo sapiens
ttaataaagtttctacagaaggg

SEQ ID NO: 1522 - DNA, 23 bp, Homo sapiens
ttactggagaaccatgcagtagg

SEQ ID NO: 1523 - DNA, 23 bp, Homo sapiens
ctaagataaaatgtgacagtagg

SEQ ID NO: 1524 - DNA, 23 bp, Homo sapiens
ctcgagaagccgcaaaaccaagg

SEQ ID NO: 1525 - DNA, 23 bp, Homo sapiens
ctacattggctaaggagccaagg

SEQ ID NO: 1526 - DNA, 23 bp, Homo sapiens
gaaaacttatacatttaagtggg

SEQ ID NO: 1527 - DNA, 23 bp, Homo sapiens
aatagaattaatatctgcagagg

SEQ ID NO: 1528 - DNA, 23 bp, Homo sapiens
aatctattaaatgaagtcctggg

SEQ ID NO: 1529 - DNA, 23 bp, Homo sapiens
tctatgaatttgctatgcaccgg

SEQ ID NO: 1530 - DNA, 23 bp, Homo sapiens
ctgaatattctatcaaagcaagg

SEQ ID NO: 1531 - DNA, 23 bp, Homo sapiens
cccttgatctctgctcaaagagg

SEQ ID NO: 1532 - DNA, 23 bp, Homo sapiens
ttctggaaaacttagcacgttgg

SEQ ID NO: 1533 - DNA, 23 bp, Homo sapiens
tgtatttttatgtagcgcgtggg

SEQ ID NO: 1534 - DNA, 23 bp, Homo sapiens
tgccgtgctacttaagagaaggg

SEQ ID NO: 1535 - DNA, 23 bp, Homo sapiens
gaaatatgtcaaacaactggagg

SEQ ID NO: 1536 - DNA, 23 bp, Homo sapiens
ctcacagtgcaagatacaaaggg

SEQ ID NO: 1537 - DNA, 23 bp, Homo sapiens
tgaggacgtgtgcaacgggatgg

SEQ ID NO: 1538 - DNA, 23 bp, Homo sapiens
taacacctgctgctatgaagagg

SEQ ID NO: 1539 - DNA, 23 bp, Homo sapiens
tacacgaaactgatgtccaatgg

SEQ ID NO: 1540 - DNA, 23 bp, Homo sapiens
ttcttccccacagaccacattgg

SEQ ID NO: 1541 - DNA, 23 bp, Homo sapiens
atgtaaccatgcttgacgctagg

SEQ ID NO: 1542 - DNA, 23 bp, Homo sapiens
acttgggctcttagaaagtaggg

SEQ ID NO: 1543 - DNA, 23 bp, Homo sapiens
agttttcacagagagcaaaaggg

SEQ ID NO: 1544 - DNA, 23 bp, Homo sapiens
taattgttatcagttgtacaagg

SEQ ID NO: 1545 - DNA, 23 bp, Homo sapiens
gcctatggaacaatacatgttgg

SEQ ID NO: 1546 - DNA, 23 bp, Homo sapiens
gcatttccctaaactgaatgagg

SEQ ID NO: 1547 - DNA, 23 bp, Homo sapiens
tcctgattgtgggaaatcagagg

SEQ ID NO: 1548 - DNA, 23 bp, Homo sapiens
aaatgaataatcttttgctaggg

SEQ ID NO: 1549 - DNA, 23 bp, Homo sapiens
tcatcctaggctgttgagaaggg

SEQ ID NO: 1550 - DNA, 23 bp, Homo sapiens
tttatattaataatcaagagtgg

SEQ ID NO: 1551 - DNA, 23 bp, Homo sapiens
tactcaagcacctttgtgcaagg

SEQ ID NO: 1552 - DNA, 23 bp, Homo sapiens
tgttcttgctataaaatgtgtgg

SEQ ID NO: 1553 - DNA, 23 bp, Homo sapiens
tacttcacttgaacttagcaggg

SEQ ID NO: 1554 - DNA, 23 bp, Homo sapiens
gtgcaaaatatgtttggcagggg

SEQ ID NO: 1555 - DNA, 23 bp, Homo sapiens
gtagcataccactatggagatgg

SEQ ID NO: 1556 - DNA, 23 bp, Homo sapiens
aacttaccacataatccgactgg

SEQ ID NO: 1557 - DNA, 23 bp, Homo sapiens
cctgattgtgggaaatcagaggg

SEQ ID NO: 1558 - DNA, 23 bp, Homo sapiens
agtcaatgcttatatgggaaagg

SEQ ID NO: 1559 - DNA, 23 bp, Homo sapiens
gctttaataagagaaacctctgg

SEQ ID NO: 1560 - DNA, 23 bp, Homo sapiens
ctctatatctgcaaactcaaggg

SEQ ID NO: 1561 - DNA, 23 bp, Homo sapiens
atttgtattaagcgaagccatgg

SEQ ID NO: 1562 - DNA, 23 bp, Homo sapiens
atcttatgacacaccaccctagg

SEQ ID NO: 1563 - DNA, 23 bp, Homo sapiens
taaggaccagaaggtgaagtggg

SEQ ID NO: 1564 - DNA, 23 bp, Homo sapiens
gttaatttatttcaggaacatgg

SEQ ID NO: 1565 - DNA, 23 bp, Homo sapiens
atgaaaacttagccttgccatgg

SEQ ID NO: 1566 - DNA, 23 bp, Homo sapiens
tgtatgcttacactgtgtgtggg

SEQ ID NO: 1567 - DNA, 23 bp, Homo sapiens
aaaattgtaccaccagtacaagg

SEQ ID NO: 1568 - DNA, 23 bp, Homo sapiens
aagtttttaatcaaagaagacgg

SEQ ID NO: 1569 - DNA, 23 bp, Homo sapiens
tctagcacaacagggtccacagg

SEQ ID NO: 1570 - DNA, 23 bp, Homo sapiens
ggcaggtcctagtttaccctagg

SEQ ID NO: 1571 - DNA, 23 bp, Homo sapiens
ccacaagtcaaagatgggtgggg

SEQ ID NO: 1572 - DNA, 23 bp, Homo sapiens
gatgaacaatccagatatagggg

SEQ ID NO: 1573 - DNA, 23 bp, Homo sapiens
ctagaatgactctcagcctaggg

SEQ ID NO: 1574 - DNA, 23 bp, Homo sapiens
acttaactctctgttgtgagggg

SEQ ID NO: 1575 - DNA, 23 bp, Homo sapiens
agcaaatgacatggagtacaggg

SEQ ID NO: 1576 - DNA, 23 bp, Homo sapiens
atagctcattagctcaatgaagg

SEQ ID NO: 1577 - DNA, 23 bp, Homo sapiens
acaaatagctgagagttggtggg

SEQ ID NO: 1578 - DNA, 23 bp, Homo sapiens
aatgatgtcaaccagtaggatgg

SEQ ID NO: 1579 - DNA, 23 bp, Homo sapiens
aagaaattagctcttggccaggg

SEQ ID NO: 1580 - DNA, 23 bp, Homo sapiens
cactgtgttggaaaataagaggg

SEQ ID NO: 1581 - DNA, 23 bp, Homo sapiens
aaacgaaaggagcttccactagg

SEQ ID NO: 1582 - DNA, 23 bp, Homo sapiens
ttcttctcctagcatcacacagg

SEQ ID NO: 1583 - DNA, 23 bp, Homo sapiens
gagctgtcagtcatagtgctggg

SEQ ID NO: 1584 - DNA, 23 bp, Homo sapiens
catatcttgtaaatatactaggg

SEQ ID NO: 1585 - DNA, 23 bp, Homo sapiens
cctgaaagcaaaataaaatgtgg

SEQ ID NO: 1586 - DNA, 23 bp, Homo sapiens
agttgggcaaagactggggtagg

SEQ ID NO: 1587 - DNA, 23 bp, Homo sapiens
gagaatacaaaagaaatcctggg

SEQ ID NO: 1588 - DNA, 23 bp, Homo sapiens
catactgaaggatttggggttgg

SEQ ID NO: 1589 - DNA, 23 bp, Homo sapiens
acaaatacataaatttggcaggg

SEQ ID NO: 1590 - DNA, 23 bp, Homo sapiens
ttacctggcagcccacctcatgg

SEQ ID NO: 1591 - DNA, 23 bp, Homo sapiens
atcttcacaagcccttgaagagg

SEQ ID NO: 1592 - DNA, 23 bp, Homo sapiens
ctgagggattggaagagtcaggg

SEQ ID NO: 1593 - DNA, 23 bp, Homo sapiens
tttcaaatatcattactccctgg

SEQ ID NO: 1594 - DNA, 23 bp, Homo sapiens
tgttgtatctctgttcgttgtgg

SEQ ID NO: 1595 - DNA, 23 bp, Homo sapiens
tcatcactaatagaaaatgatgg

SEQ ID NO: 1596 - DNA, 23 bp, Homo sapiens
acactacaatcatatatatgtgg

SEQ ID NO: 1597 - DNA, 23 bp, Homo sapiens
agatccccccattacacttgtgg

SEQ ID NO: 1598 - DNA, 23 bp, Homo sapiens
agaaagaagtagcaaatgcaagg

SEQ ID NO: 1599 - DNA, 23 bp, Homo sapiens
ttcaaaataatgagcactagagg

SEQ ID NO: 1600 - DNA, 23 bp, Homo sapiens
gcagagtactactgaagttgagg

SEQ ID NO: 1601 - DNA, 23 bp, Homo sapiens
agtataaatcaactgcgcattgg

SEQ ID NO: 1602 - DNA, 23 bp, Homo sapiens
agattacacatgttgttaagggg

SEQ ID NO: 1603 - DNA, 23 bp, Homo sapiens
gttcttacttcgtagaatggtgg

SEQ ID NO: 1604 - DNA, 23 bp, Homo sapiens
ttaatagaactagagaatcaggg

SEQ ID NO: 1605 - DNA, 23 bp, Homo sapiens
tcagacagtgatgtttcatgtgg

SEQ ID NO: 1606 - DNA, 23 bp, Homo sapiens
cttcccatctgaatgagagatgg

SEQ ID NO: 1607 - DNA, 23 bp, Homo sapiens
gggagaaatgagtaaaaatgtgg

SEQ ID NO: 1608 - DNA, 23 bp, Homo sapiens
aatttctatgaatttcaagtggg

SEQ ID NO: 1609 - DNA, 23 bp, Homo sapiens
acagggactctcttctagtaggg

SEQ ID NO: 1610 - DNA, 23 bp, Homo sapiens
gcaaggacatgtaggaaggaagg

SEQ ID NO: 1611 - DNA, 23 bp, Homo sapiens
acagtgagagttggatagagagg

SEQ ID NO: 1612 - DNA, 23 bp, Homo sapiens
tcatatgttcactagtactgagg

SEQ ID NO: 1613 - DNA, 23 bp, Homo sapiens
aaggaataatcatttctccatgg

SEQ ID NO: 1614 - DNA, 23 bp, Homo sapiens
aggatttgtcaatattccaaggg

SEQ ID NO: 1615 - DNA, 23 bp, Homo sapiens
acatacttttcagataacattgg

SEQ ID NO: 1616 - DNA, 23 bp, Homo sapiens
caggaaaaggggttcaagaaggg

SEQ ID NO: 1617 - DNA, 23 bp, Homo sapiens
ttcagccaaaagtaaagaagagg

SEQ ID NO: 1618 - DNA, 23 bp, Homo sapiens
ggcacagtaagcctttggatggg

SEQ ID NO: 1619 - DNA, 23 bp, Homo sapiens
ttttaagtaaaagggacacctgg

SEQ ID NO: 1620 - DNA, 23 bp, Homo sapiens
ggatttagtgtcagatatggagg

SEQ ID NO: 1621 - DNA, 23 bp, Homo sapiens
ctatggcaccttcagtgataggg

SEQ ID NO: 1622 - DNA, 23 bp, Homo sapiens
atcctggcagaaaactatgctgg

SEQ ID NO: 1623 - DNA, 23 bp, Homo sapiens
tattgtacctcacagcatagagg

SEQ ID NO: 1624 - DNA, 23 bp, Homo sapiens
ttttccacatcactcacactagg

SEQ ID NO: 1625 - DNA, 23 bp, Homo sapiens
aggtagaagccactgagagaggg

SEQ ID NO: 1626 - DNA, 23 bp, Homo sapiens
atcactcgttcaaaatacttggg

SEQ ID NO: 1627 - DNA, 23 bp, Homo sapiens
aggtagctaagtattaggaaggg

SEQ ID NO: 1628 - DNA, 23 bp, Homo sapiens
actataacctatggataggatgg

SEQ ID NO: 1629 - DNA, 23 bp, Homo sapiens
atattggaacttactctgctagg

SEQ ID NO: 1630 - DNA, 23 bp, Homo sapiens
ggttacaaaggagggctgaaagg

SEQ ID NO: 1631 - DNA, 23 bp, Homo sapiens
cctagtatcttgataaccccagg

SEQ ID NO: 1632 - DNA, 23 bp, Homo sapiens
cttttatatgtttagcctagagg

SEQ ID NO: 1633 - DNA, 23 bp, Homo sapiens
tcatgcatatgattacagaaagg

SEQ ID NO: 1634 - DNA, 23 bp, Homo sapiens
atagtgcccaaccagagcaaagg

SEQ ID NO: 1635 - DNA, 23 bp, Homo sapiens
ctgtgacgacgatcattggtggg

SEQ ID NO: 1636 - DNA, 23 bp, Homo sapiens
aagagaattacgttaagggatgg

SEQ ID NO: 1637 - DNA, 23 bp, Homo sapiens
aatactgtaggttaagaaagtgg

SEQ ID NO: 1638 - DNA, 23 bp, Homo sapiens
aaacccacgaagagagaagaggg

SEQ ID NO: 1639 - DNA, 23 bp, Homo sapiens
tggacaagattgaggaacaaagg

SEQ ID NO: 1640 - DNA, 23 bp, Homo sapiens
aggatggtatcaggttagcttgg

SEQ ID NO: 1641 - DNA, 23 bp, Homo sapiens
tcatatttaacaaatctaagtgg

SEQ ID NO: 1642 - DNA, 23 bp, Homo sapiens
taacatgaaaaaattggtagggg

SEQ ID NO: 1643 - DNA, 23 bp, Homo sapiens
ttgttattagccacaaatcaggg

SEQ ID NO: 1644 - DNA, 23 bp, Homo sapiens
tagaacaaagtggcaggcatggg

SEQ ID NO: 1645 - DNA, 23 bp, Homo sapiens
agaccaccctaaaaatcaccagg

SEQ ID NO: 1646 - DNA, 23 bp, Homo sapiens
ccttaaaatgttaagtactgagg

SEQ ID NO: 1647 - DNA, 23 bp, Homo sapiens
gatcagtcagagtccaggcttgg

SEQ ID NO: 1648 - DNA, 23 bp, Homo sapiens
gcacatgtaggaaatataagtgg

SEQ ID NO: 1649 - DNA, 23 bp, Homo sapiens
tagtatcataatctttaccatgg

SEQ ID NO: 1650 - DNA, 23 bp, Homo sapiens
ttatctgtatacaaattcaccgg

SEQ ID NO: 1651 - DNA, 23 bp, Homo sapiens
tttctatcacagatttacatggg

SEQ ID NO: 1652 - DNA, 23 bp, Homo sapiens
aagcactgagaattagggatagg

SEQ ID NO: 1653 - DNA, 23 bp, Homo sapiens
atccagactactaagaacattgg

SEQ ID NO: 1654 - DNA, 23 bp, Homo sapiens
agtattgacagtctgaccatggg

SEQ ID NO: 1655 - DNA, 23 bp, Homo sapiens
tgagcaaacgtttatagaggagg

SEQ ID NO: 1656 - DNA, 23 bp, Homo sapiens
caagggcatcaagtaagaagagg

SEQ ID NO: 1657 - DNA, 23 bp, Homo sapiens
gaaagaaacttaactagcagtgg

SEQ ID NO: 1658 - DNA, 23 bp, Homo sapiens
agatgtatttttaagctaggagg

SEQ ID NO: 1659 - DNA, 23 bp, Homo sapiens
ggatgagtaacttttgaaggagg

SEQ ID NO: 1660 - DNA, 23 bp, Homo sapiens
actccgttacacgtttacaaagg

SEQ ID NO: 1661 - DNA, 23 bp, Homo sapiens
ggttaaacggaagcaaaagtagg

SEQ ID NO: 1662 - DNA, 23 bp, Homo sapiens
ttattgttctagcagcaagaagg

SEQ ID NO: 1663 - DNA, 23 bp, Homo sapiens
tctgttttgaaaaatagtcaagg

SEQ ID NO: 1664 - DNA, 23 bp, Homo sapiens
ttacaatatattgagtacactgg

SEQ ID NO: 1665 - DNA, 23 bp, Homo sapiens
acacctgtcatctcaaaagaagg

SEQ ID NO: 1666 - DNA, 23 bp, Homo sapiens
gctcatttaggtagtttgagtgg

SEQ ID NO: 1667 - DNA, 23 bp, Homo sapiens
ttgaactcctaattagaggatgg

SEQ ID NO: 1668 - DNA, 23 bp, Homo sapiens
ccatattcttaagacaacttggg

SEQ ID NO: 1669 - DNA, 23 bp, Homo sapiens
ccacatccactgataggcaatgg

SEQ ID NO: 1670 - DNA, 23 bp, Homo sapiens
aacagactcttaagcagcagtgg

SEQ ID NO: 1671 - DNA, 23 bp, Homo sapiens
tgaaacatataagttatgacagg

SEQ ID NO: 1672 - DNA, 23 bp, Homo sapiens
agtgtaatctagcacagcaatgg

SEQ ID NO: 1673 - DNA, 23 bp, Homo sapiens
cttttcatgactctatctggtgg

SEQ ID NO: 1674 - DNA, 23 bp, Homo sapiens
gtgactagaaaatctgaactagg

SEQ ID NO: 1675 - DNA, 23 bp, Homo sapiens
agagaataaaaggcccagaatgg

SEQ ID NO: 1676 - DNA, 23 bp, Homo sapiens
acagtgcctaaagtcgaaaaggg

SEQ ID NO: 1677 - DNA, 23 bp, Homo sapiens
aatgcgaagccactacccatggg

SEQ ID NO: 1678 - DNA, 23 bp, Homo sapiens
tcaccagggctgagaataggagg

SEQ ID NO: 1679 - DNA, 23 bp, Homo sapiens
ttacatttctaaataaatgtggg

SEQ ID NO: 1680 - DNA, 23 bp, Homo sapiens
atgaaatactttaacacccaggg

SEQ ID NO: 1681 - DNA, 23 bp, Homo sapiens
atataccgcctatagttgatggg

SEQ ID NO: 1682 - DNA, 23 bp, Homo sapiens
agatagctaggctaattccaagg

SEQ ID NO: 1683 - DNA, 23 bp, Homo sapiens
cattagctgctttctagctgagg

SEQ ID NO: 1684 - DNA, 23 bp, Homo sapiens
caacacatacaataaatgtaggg

SEQ ID NO: 1685 - DNA, 23 bp, Homo sapiens
tcaaactttattgctccagtagg

SEQ ID NO: 1686 - DNA, 23 bp, Homo sapiens
attagttcctttactcaacaagg

SEQ ID NO: 1687 - DNA, 23 bp, Homo sapiens
atataacacagaaagtaaaaggg

SEQ ID NO: 1688 - DNA, 23 bp, Homo sapiens
gtgagtaactagaaatgcatggg

SEQ ID NO: 1689 - DNA, 23 bp, Homo sapiens
ttcactgtatctatgcagaaagg

SEQ ID NO: 1690 - DNA, 23 bp, Homo sapiens
aattaaactccaatatattgagg

SEQ ID NO: 1691 - DNA, 23 bp, Homo sapiens
cataatcactgagcttctcaggg

SEQ ID NO: 1692 - DNA, 23 bp, Homo sapiens
agatgaatgtgatttaaatgggg

SEQ ID NO: 1693 - DNA, 23 bp, Homo sapiens
gttacattttctatgactagagg

SEQ ID NO: 1694 - DNA, 23 bp, Homo sapiens
agaatgaaaatctatctggttgg

SEQ ID NO: 1695 - DNA, 23 bp, Homo sapiens
ggcttaatagaagatcagttggg

SEQ ID NO: 1696 - DNA, 23 bp, Homo sapiens
gattacaccttgtactgggatgg

SEQ ID NO: 1697 - DNA, 23 bp, Homo sapiens
attgtgttcaaaatttacactgg

SEQ ID NO: 1698 - DNA, 23 bp, Homo sapiens
ccaaccagcaaaataaccctagg

SEQ ID NO: 1699 - DNA, 23 bp, Homo sapiens
tttatagtaggcagtgcatacgg

SEQ ID NO: 1700 - DNA, 23 bp, Homo sapiens
gaacaggcgggtcccatgggtgg

SEQ ID NO: 1701 - DNA, 23 bp, Homo sapiens
atcgactcttggaatggcagcgg

SEQ ID NO: 1702 - DNA, 23 bp, Homo sapiens
tggttccagtgagatacagcagg

SEQ ID NO: 1703 - DNA, 23 bp, Homo sapiens
ggaagaagatctttgcatgcagg

SEQ ID NO: 1704 - DNA, 23 bp, Homo sapiens
tactggagaaccatgcagtaggg

SEQ ID NO: 1705 - DNA, 23 bp, Homo sapiens
gccttgtagttatcccacatggg

SEQ ID NO: 1706 - DNA, 23 bp, Homo sapiens
atatgtgctcaagtgagtacagg

SEQ ID NO: 1707 - DNA, 23 bp, Homo sapiens
tttgatggaagtatgagtaaggg

SEQ ID NO: 1708 - DNA, 23 bp, Homo sapiens
acaataactggaaaagtgaaagg

SEQ ID NO: 1709 - DNA, 23 bp, Homo sapiens
gtgttttaagaagatatatgtgg

SEQ ID NO: 1710 - DNA, 23 bp, Homo sapiens
tataattgagaattagtgcaggg

SEQ ID NO: 1711 - DNA, 23 bp, Homo sapiens
gaaattgctaatacaatggacgg

SEQ ID NO: 1712 - DNA, 23 bp, Homo sapiens
caaggataggactttatccatgg

SEQ ID NO: 1713 - DNA, 23 bp, Homo sapiens
gggtataaagtttcctaagaggg

SEQ ID NO: 1714 - DNA, 23 bp, Homo sapiens
ttatgagtcagtttgaaatgagg

SEQ ID NO: 1715 - DNA, 23 bp, Homo sapiens
tgaaaaaaataaggaccagaagg

SEQ ID NO: 1716 - DNA, 23 bp, Homo sapiens
tgagaaaagcttaaagctaacgg

SEQ ID NO: 1717 - DNA, 23 bp, Homo sapiens
gagggcaaaagaactgtagacgg

SEQ ID NO: 1718 - DNA, 23 bp, Homo sapiens
gcttttgatgtattctaatgggg

SEQ ID NO: 1719 - DNA, 23 bp, Homo sapiens
atatgaggaaatagatcaccagg

SEQ ID NO: 1720 - DNA, 23 bp, Homo sapiens
acataacagactcctttcacagg

SEQ ID NO: 1721 - DNA, 23 bp, Homo sapiens
acagactattttccccccatggg

SEQ ID NO: 1722 - DNA, 23 bp, Homo sapiens
ccaggcaaagaaagaagagatgg

SEQ ID NO: 1723 - DNA, 23 bp, Homo sapiens
ttaagactcattcaggactcagg

SEQ ID NO: 1724 - DNA, 23 bp, Homo sapiens
ttttccaaacgtttataacaagg

SEQ ID NO: 1725 - DNA, 23 bp, Homo sapiens
gtagagctgtgtgaatccatggg

SEQ ID NO: 1726 - DNA, 23 bp, Homo sapiens
gtaaacatcatcaaggcagatgg

SEQ ID NO: 1727 - DNA, 23 bp, Homo sapiens
gtagttaaggtactaaagtaggg

SEQ ID NO: 1728 - DNA, 23 bp, Homo sapiens
gcaggaagttgggaggctggtgg

SEQ ID NO: 1729 - DNA, 23 bp, Homo sapiens
gagttactctcccattcgaaggg

SEQ ID NO: 1730 - DNA, 23 bp, Homo sapiens
aaaggaatccccacaaattgggg

SEQ ID NO: 1731 - DNA, 23 bp, Homo sapiens
aaaaatcatatacatagaagtgg

SEQ ID NO: 1732 - DNA, 23 bp, Homo sapiens
tctattcattcaggctaaggggg

SEQ ID NO: 1733 - DNA, 23 bp, Homo sapiens
acaagcgctagaagttatgctgg

SEQ ID NO: 1734 - DNA, 23 bp, Homo sapiens
atgatctcagagtactacattgg

SEQ ID NO: 1735 - DNA, 23 bp, Homo sapiens
tactggtagcagaaagaatgagg

SEQ ID NO: 1736 - DNA, 23 bp, Homo sapiens
tcaccgtgattactaatggatgg

SEQ ID NO: 1737 - DNA, 23 bp, Homo sapiens
ttttaaacgtccttttgtagagg

SEQ ID NO: 1738 - DNA, 23 bp, Homo sapiens
aaggcctagtgaggaaagatggg

SEQ ID NO: 1739 - DNA, 23 bp, Homo sapiens
actggttgacatcattacgttgg

SEQ ID NO: 1740 - DNA, 23 bp, Homo sapiens
gtacacgttgtctttatgaaagg

SEQ ID NO: 1741 - DNA, 23 bp, Homo sapiens
catctgatgccttagcaaagagg

SEQ ID NO: 1742 - DNA, 23 bp, Homo sapiens
gcacgaatgtcagtgtcgtatgg

SEQ ID NO: 1743 - DNA, 23 bp, Homo sapiens
tgcattttattaaattagagtgg

SEQ ID NO: 1744 - DNA, 23 bp, Homo sapiens
acaataagtaagcttgtgaaggg

SEQ ID NO: 1745 - DNA, 23 bp, Homo sapiens
tggggtacgatacagtgtaaagg

SEQ ID NO: 1746 - DNA, 23 bp, Homo sapiens
ctccttcgttatgaatctggagg

SEQ ID NO: 1747 - DNA, 23 bp, Homo sapiens
attattttaccaagtttggaggg

SEQ ID NO: 1748 - DNA, 23 bp, Homo sapiens
aagttgaaatacgttcactaagg

SEQ ID NO: 1749 - DNA, 23 bp, Homo sapiens
gtatttcgtaagaggatgctggg

SEQ ID NO: 1750 - DNA, 23 bp, Homo sapiens
cacacgtttttaatttaatgcgg

SEQ ID NO: 1751 - DNA, 23 bp, Homo sapiens
accagaaaagagttaaagcatgg

SEQ ID NO: 1752 - DNA, 23 bp, Homo sapiens
tggagatgaagccctacactagg

SEQ ID NO: 1753 - DNA, 23 bp, Homo sapiens
gacgacacagttatttctagagg

SEQ ID NO: 1754 - DNA, 23 bp, Homo sapiens
ggagagcctacatgtagcctagg

SEQ ID NO: 1755 - DNA, 23 bp, Homo sapiens
aatcacatttgatgttgtaaggg

SEQ ID NO: 1756 - DNA, 23 bp, Homo sapiens
taattaccttccccatccaaagg

SEQ ID NO: 1757 - DNA, 23 bp, Homo sapiens
ttatccctaagacctatgtatgg

SEQ ID NO: 1758 - DNA, 23 bp, Homo sapiens
cacttaagatgttagagggaggg

SEQ ID NO: 1759 - DNA, 23 bp, Homo sapiens
gcatcttctgtgactatgcaggg

SEQ ID NO: 1760 - DNA, 23 bp, Homo sapiens
tgataaaaattattgaaaagggg

SEQ ID NO: 1761 - DNA, 23 bp, Homo sapiens
tgttccttagtattgagggaagg

SEQ ID NO: 1762 - DNA, 23 bp, Homo sapiens
ccatacctaacctccattggcgg

SEQ ID NO: 1763 - DNA, 23 bp, Homo sapiens
tgtgtgggtttttatgcctgtgg

SEQ ID NO: 1764 - DNA, 23 bp, Homo sapiens
ctgacaacacagaacgaaccagg

SEQ ID NO: 1765 - DNA, 23 bp, Homo sapiens
tgtgtgtttcagagttgggatgg

SEQ ID NO: 1766 - DNA, 23 bp, Homo sapiens
atacgtgcatgctttaaggaagg

SEQ ID NO: 1767 - DNA, 23 bp, Homo sapiens
ggctgactggaccaagattgagg

SEQ ID NO: 1768 - DNA, 23 bp, Homo sapiens
tattataaaagcaggtcagaggg

SEQ ID NO: 1769 - DNA, 23 bp, Homo sapiens
tcctacagacaattttgccaagg

SEQ ID NO: 1770 - DNA, 23 bp, Homo sapiens
tatatttgaggaaataatgaggg

SEQ ID NO: 1771 - DNA, 23 bp, Homo sapiens
ggctgacacaatcataagcatgg

SEQ ID NO: 1772 - DNA, 23 bp, Homo sapiens
tttcatctagactgaactcatgg

SEQ ID NO: 1773 - DNA, 23 bp, Homo sapiens
cctagtagattgtaaggccaagg

SEQ ID NO: 1774 - DNA, 23 bp, Homo sapiens
agtattttgcatgaagccaaagg

SEQ ID NO: 1775 - DNA, 23 bp, Homo sapiens
tgtgagtaactagaaatgcatgg

SEQ ID NO: 1776 - DNA, 23 bp, Homo sapiens
gttagatacaatgcaggccgggg

SEQ ID NO: 1777 - DNA, 23 bp, Homo sapiens
attagcagtagatgtatctaggg

SEQ ID NO: 1778 - DNA, 23 bp, Homo sapiens
ctagtgtatgagattagatgagg

SEQ ID NO: 1779 - DNA, 23 bp, Homo sapiens
cttttcttttaatatacccaagg

SEQ ID NO: 1780 - DNA, 23 bp, Homo sapiens
atattaaagattgaagtcaatgg

SEQ ID NO: 1781 - DNA, 23 bp, Homo sapiens
atgccttagcaaagaggagtagg

SEQ ID NO: 1782 - DNA, 23 bp, Homo sapiens
gtatgtgcattagagagctatgg

SEQ ID NO: 1783 - DNA, 23 bp, Homo sapiens
tcctttaagtaagacagccaggg

SEQ ID NO: 1784 - DNA, 23 bp, Homo sapiens
gctagagaaggtcagaagaaggg

SEQ ID NO: 1785 - DNA, 23 bp, Homo sapiens
atgaagccttccaatttacctgg

SEQ ID NO: 1786 - DNA, 23 bp, Homo sapiens
gcataaaatctaccagtaggtgg

SEQ ID NO: 1787 - DNA, 23 bp, Homo sapiens
aagatctaggtcgaatgtgaggg

SEQ ID NO: 1788 - DNA, 23 bp, Homo sapiens
gatataaccacaatcagaagtgg

SEQ ID NO: 1789 - DNA, 23 bp, Homo sapiens
ggaaacaacttgaaagaggaagg

SEQ ID NO: 1790 - DNA, 23 bp, Homo sapiens
aatggaagaatttatctggtagg

SEQ ID NO: 1791 - DNA, 23 bp, Homo sapiens
ttacttcgtagaatggtggttgg

SEQ ID NO: 1792 - DNA, 23 bp, Homo sapiens
tacttcatttttctcccgagagg

SEQ ID NO: 1793 - DNA, 23 bp, Homo sapiens
catcgttatgtgaatgccatggg

SEQ ID NO: 1794 - DNA, 23 bp, Homo sapiens
tattacaatgtaattagccatgg

SEQ ID NO: 1795 - DNA, 23 bp, Homo sapiens
tttctttttcctgattccaaggg

SEQ ID NO: 1796 - DNA, 23 bp, Homo sapiens
tctctttttaatttcctaggagg

SEQ ID NO: 1797 - DNA, 23 bp, Homo sapiens
ctataatttaataaatccaaggg

SEQ ID NO: 1798 - DNA, 23 bp, Homo sapiens
agggagcttgaaattttgcaagg

SEQ ID NO: 1799 - DNA, 23 bp, Homo sapiens
tgaatgggtcagcagccaaaggg

SEQ ID NO: 1800 - DNA, 23 bp, Homo sapiens
agatttagattaactggggtagg

SEQ ID NO: 1801 - DNA, 23 bp, Homo sapiens
tgaataccaagaggatggaaagg

SEQ ID NO: 1802 - DNA, 23 bp, Homo sapiens
atctaaatctgcaaaacgaaagg

SEQ ID NO: 1803 - DNA, 23 bp, Homo sapiens
gaaaacactcaattggggagagg

SEQ ID NO: 1804 - DNA, 23 bp, Homo sapiens
aagcaaatggagcatgagcatgg

SEQ ID NO: 1805 - DNA, 23 bp, Homo sapiens
aatttgcccttatgaaaggaagg

SEQ ID NO: 1806 - DNA, 23 bp, Homo sapiens
gatttataaaaggcaaacatggg

SEQ ID NO: 1807 - DNA, 23 bp, Homo sapiens
attaagcactatgtctgcatagg

SEQ ID NO: 1808 - DNA, 23 bp, Homo sapiens
ttagtttaaaacaatactgaagg

SEQ ID NO: 1809 - DNA, 23 bp, Homo sapiens
attaaaaagaactttcccacagg

SEQ ID NO: 1810 - DNA, 23 bp, Homo sapiens
tagtttcagttttcaaactgtgg

SEQ ID NO: 1811 - DNA, 23 bp, Homo sapiens
ctctctcatggacagtcagaggg

SEQ ID NO: 1812 - DNA, 23 bp, Homo sapiens
agagcttcttattgagaaagggg

SEQ ID NO: 1813 - DNA, 23 bp, Homo sapiens
tatgctcaccctttacagaaagg

SEQ ID NO: 1814 - DNA, 23 bp, Homo sapiens
agtatttcctttgttgacaaggg

SEQ ID NO: 1815 - DNA, 23 bp, Homo sapiens
ctccgtgcagattctaaggaagg

SEQ ID NO: 1816 - DNA, 23 bp, Homo sapiens
gaaaccagcagggacctgaatgg

SEQ ID NO: 1817 - DNA, 23 bp, Homo sapiens
gctttctgaactgattggaaagg

SEQ ID NO: 1818 - DNA, 23 bp, Homo sapiens
agtatcccttgatacctgaatgg

SEQ ID NO: 1819 - DNA, 23 bp, Homo sapiens
ggatgggaaaacaatcagaatgg

SEQ ID NO: 1820 - DNA, 23 bp, Homo sapiens
atgaaatgtttctcagctaaggg

SEQ ID NO: 1821 - DNA, 23 bp, Homo sapiens
gatgttggagcaatagccacagg

SEQ ID NO: 1822 - DNA, 23 bp, Homo sapiens
gggataatcactttcactaacgg

SEQ ID NO: 1823 - DNA, 23 bp, Homo sapiens
acagactcttaagcagcagtggg

SEQ ID NO: 1824 - DNA, 23 bp, Homo sapiens
atatctgagcaacagatgctagg

SEQ ID NO: 1825 - DNA, 23 bp, Homo sapiens
tatctcaagagcaaacacttagg

SEQ ID NO: 1826 - DNA, 23 bp, Homo sapiens
ttgcatcagtttctaaacgaggg

SEQ ID NO: 1827 - DNA, 23 bp, Homo sapiens
tagtttatattacttgagggtgg

SEQ ID NO: 1828 - DNA, 23 bp, Homo sapiens
tattcactgccaataacttgggg

SEQ ID NO: 1829 - DNA, 23 bp, Homo sapiens
gatgaaaaacaactgcagaaagg

SEQ ID NO: 1830 - DNA, 23 bp, Homo sapiens
caaaagttcatagaaaaaagagg

SEQ ID NO: 1831 - DNA, 23 bp, Homo sapiens
caacccacttgcatagtgtaggg

SEQ ID NO: 1832 - DNA, 23 bp, Homo sapiens
tctaagtgacaaaattctgatgg

SEQ ID NO: 1833 - DNA, 23 bp, Homo sapiens
ttgtcttctatggcaaaccatgg

SEQ ID NO: 1834 - DNA, 23 bp, Homo sapiens
gatagatttacagaaagagaagg

SEQ ID NO: 1835 - DNA, 23 bp, Homo sapiens
aagtatagtttctcaataggagg

SEQ ID NO: 1836 - DNA, 23 bp, Homo sapiens
catattcattatgaatgctgagg

SEQ ID NO: 1837 - DNA, 23 bp, Homo sapiens
atattgagatacttgccataagg

SEQ ID NO: 1838 - DNA, 23 bp, Homo sapiens
tgacagcagtcagttcattgagg

SEQ ID NO: 1839 - DNA, 23 bp, Homo sapiens
ttgaagagataaaaacaagcggg

SEQ ID NO: 1840 - DNA, 23 bp, Homo sapiens
tgctgtcaatgtacacctgaagg

SEQ ID NO: 1841 - DNA, 23 bp, Homo sapiens
gagagagaagacttgcaaaaggg

SEQ ID NO: 1842 - DNA, 23 bp, Homo sapiens
ttaactaacagactaatggaagg

SEQ ID NO: 1843 - DNA, 23 bp, Homo sapiens
agcataatttaataaatagacgg

SEQ ID NO: 1844 - DNA, 23 bp, Homo sapiens
tgggtaataggaatatgggatgg

SEQ ID NO: 1845 - DNA, 23 bp, Homo sapiens
agtggggcaaaaaatgaggtagg

SEQ ID NO: 1846 - DNA, 23 bp, Homo sapiens
gtatggtactgggattgtagtgg

SEQ ID NO: 1847 - DNA, 23 bp, Homo sapiens
tttataaccctgatattccaagg

SEQ ID NO: 1848 - DNA, 23 bp, Homo sapiens
acagttcctaaggccttacctgg

SEQ ID NO: 1849 - DNA, 23 bp, Homo sapiens
ttttgattggattcagagagagg

SEQ ID NO: 1850 - DNA, 23 bp, Homo sapiens
ctactccactcgcatcatccagg

SEQ ID NO: 1851 - DNA, 23 bp, Homo sapiens
ttcatatttcaatatccccatgg

SEQ ID NO: 1852 - DNA, 23 bp, Homo sapiens
ggaagaacttgagccaacttggg

SEQ ID NO: 1853 - DNA, 23 bp, Homo sapiens
ttgatatgctaaataaaaggggg

SEQ ID NO: 1854 - DNA, 23 bp, Homo sapiens
acatgtgtcggtgcttgagaagg

SEQ ID NO: 1855 - DNA, 23 bp, Homo sapiens
cagagatcctacaagaatcccgg

SEQ ID NO: 1856 - DNA, 23 bp, Homo sapiens
ctagaagttatgctggtccacgg

SEQ ID NO: 1857 - DNA, 23 bp, Homo sapiens
cattcgtgtgtgctgtgttgtgg

SEQ ID NO: 1858 - DNA, 23 bp, Homo sapiens
agttagtgcacaagaggcgttgg

SEQ ID NO: 1859 - DNA, 23 bp, Homo sapiens
tcgcagagaataagaatcaaagg

SEQ ID NO: 1860 - DNA, 23 bp, Homo sapiens
atgttccattcaggtatcaaggg

SEQ ID NO: 1861 - DNA, 23 bp, Homo sapiens
tggggaaaaaacagaccagatgg

SEQ ID NO: 1862 - DNA, 23 bp, Homo sapiens
ttagttgacaacactgctgaagg

SEQ ID NO: 1863 - DNA, 23 bp, Homo sapiens
gcttagcataaccataacctagg

SEQ ID NO: 1864 - DNA, 23 bp, Homo sapiens
agataggaaaaggttagttgagg

SEQ ID NO: 1865 - DNA, 23 bp, Homo sapiens
gtgagatgtctaccaatgccggg

SEQ ID NO: 1866 - DNA, 23 bp, Homo sapiens
ggccacctgctcttatgcgtagg

SEQ ID NO: 1867 - DNA, 23 bp, Homo sapiens
agaaagaaaatatacaaaggagg

SEQ ID NO: 1868 - DNA, 23 bp, Homo sapiens
cagatgatcctacagttatgagg

SEQ ID NO: 1869 - DNA, 23 bp, Homo sapiens
atattactcttcagccacctagg

SEQ ID NO: 1870 - DNA, 23 bp, Homo sapiens
atatctaaatgtgaagttggcgg

SEQ ID NO: 1871 - DNA, 23 bp, Homo sapiens
gagaggatccaatgccacattgg

SEQ ID NO: 1872 - DNA, 23 bp, Homo sapiens
aagcactatggtgtgccacttgg

SEQ ID NO: 1873 - DNA, 23 bp, Homo sapiens
gaatctaggcagctattccaggg

SEQ ID NO: 1874 - DNA, 23 bp, Homo sapiens
aggaaagggtagttttcaagagg

SEQ ID NO: 1875 - DNA, 23 bp, Homo sapiens
tgacatcaaggaatattaagtgg

SEQ ID NO: 1876 - DNA, 23 bp, Homo sapiens
cttgacctagaatcagaagttgg

SEQ ID NO: 1877 - DNA, 23 bp, Homo sapiens
gttatctaaaataatcagcatgg

SEQ ID NO: 1878 - DNA, 23 bp, Homo sapiens
gccagcacacaggtgccttgagg

SEQ ID NO: 1879 - DNA, 23 bp, Homo sapiens
tcataattcatatatacagcagg

SEQ ID NO: 1880 - DNA, 23 bp, Homo sapiens
gctccccccaccctactgcatgg

SEQ ID NO: 1881 - DNA, 23 bp, Homo sapiens
tctgtttgatgaaggaggctggg

SEQ ID NO: 1882 - DNA, 23 bp, Homo sapiens
tgcatctaacataataaagaggg

SEQ ID NO: 1883 - DNA, 23 bp, Homo sapiens
ccaatgagtgacccacctactgg

SEQ ID NO: 1884 - DNA, 23 bp, Homo sapiens
atgatgctaaaaaaaattggagg

SEQ ID NO: 1885 - DNA, 23 bp, Homo sapiens
aaaaactgagcattatgcaaggg

SEQ ID NO: 1886 - DNA, 23 bp, Homo sapiens
ttctaaaagcaggtgtaagaggg

SEQ ID NO: 1887 - DNA, 23 bp, Homo sapiens
tatcccagataagagccttaggg

SEQ ID NO: 1888 - DNA, 23 bp, Homo sapiens
tgatcaaatatgttctagaaggg

SEQ ID NO: 1889 - DNA, 23 bp, Homo sapiens
attcctacagaactctctgatgg

SEQ ID NO: 1890 - DNA, 23 bp, Homo sapiens
tatatatacgtggcttatgaggg

SEQ ID NO: 1891 - DNA, 23 bp, Homo sapiens
acattttcgttggcagtgaaggg

SEQ ID NO: 1892 - DNA, 23 bp, Homo sapiens
tcgttctgtgttgtcagacaggg

SEQ ID NO: 1893 - DNA, 23 bp, Homo sapiens
tctggatttaaatttctaagtgg

SEQ ID NO: 1894 - DNA, 23 bp, Homo sapiens
attttcttagaatatggctaagg

SEQ ID NO: 1895 - DNA, 23 bp, Homo sapiens
agtgctatcatcctagtgtaggg

SEQ ID NO: 1896 - DNA, 23 bp, Homo sapiens
gaatggtaagtttgtctgcaggg

SEQ ID NO: 1897 - DNA, 23 bp, Homo sapiens
ctcagggtaatgcttagaggtgg

SEQ ID NO: 1898 - DNA, 23 bp, Homo sapiens
tctttttttcacctactcgtagg

SEQ ID NO: 1899 - DNA, 23 bp, Homo sapiens
aaaataactaggaagcaaaaggg

SEQ ID NO: 1900 - DNA, 23 bp, Homo sapiens
taatgcccatgtgagaaaagagg

SEQ ID NO: 1901 - DNA, 23 bp, Homo sapiens
aattgatagcaagatttcaaggg

SEQ ID NO: 1902 - DNA, 23 bp, Homo sapiens
tatagtttctcaataggaggtgg

SEQ ID NO: 1903 - DNA, 23 bp, Homo sapiens
atattaagtggcacattgaaggg

SEQ ID NO: 1904 - DNA, 23 bp, Homo sapiens
tatattactttggaagtgcaggg

SEQ ID NO: 1905 - DNA, 23 bp, Homo sapiens
gaaaaatcacaaaatcagaatgg

SEQ ID NO: 1906 - DNA, 23 bp, Homo sapiens
tggcaggatacaggaataccagg

SEQ ID NO: 1907 - DNA, 23 bp, Homo sapiens
attaggctcaacttttcagtcgg

SEQ ID NO: 1908 - DNA, 23 bp, Homo sapiens
ctagttgaggacgtgtgcaacgg

SEQ ID NO: 1909 - DNA, 23 bp, Homo sapiens
tattgtagctcaaatgttggagg

SEQ ID NO: 1910 - DNA, 23 bp, Homo sapiens
ataaacccttgtttaggccaagg

SEQ ID NO: 1911 - DNA, 23 bp, Homo sapiens
ataaatacacatttattccacgg

SEQ ID NO: 1912 - DNA, 23 bp, Homo sapiens
ctacgcaaagtcaccttcagagg

SEQ ID NO: 1913 - DNA, 23 bp, Homo sapiens
gcatatgagtttgtgagcgaagg

SEQ ID NO: 1914 - DNA, 23 bp, Homo sapiens
tgatatccaaaaatgaagacagg

SEQ ID NO: 1915 - DNA, 23 bp, Homo sapiens
ctcttccagcagcttcctagtgg

SEQ ID NO: 1916 - DNA, 23 bp, Homo sapiens
atttagctctgataattacaagg

SEQ ID NO: 1917 - DNA, 23 bp, Homo sapiens
atgtgccttcttaaaccagatgg

SEQ ID NO: 1918 - DNA, 23 bp, Homo sapiens
ctatttcacaccgtaaaagtcgg

SEQ ID NO: 1919 - DNA, 23 bp, Homo sapiens
agtgtagtcatctttgtggtagg

SEQ ID NO: 1920 - DNA, 23 bp, Homo sapiens
taatagatgtgagtgtaggttgg

SEQ ID NO: 1921 - DNA, 23 bp, Homo sapiens
tgagttagaaggtagaggagtgg

SEQ ID NO: 1922 - DNA, 23 bp, Homo sapiens
gaattaagcgttaacaaagaagg

SEQ ID NO: 1923 - DNA, 23 bp, Homo sapiens
agttaaaatggcaacaccatggg

SEQ ID NO: 1924 - DNA, 23 bp, Homo sapiens
atactttgaatctaagggaaagg

SEQ ID NO: 1925 - DNA, 23 bp, Homo sapiens
atatgttctgtacatcagccggg

SEQ ID NO: 1926 - DNA, 23 bp, Homo sapiens
cactgtacattgacttcccaggg

SEQ ID NO: 1927 - DNA, 23 bp, Homo sapiens
tggagaaccatgcagtagggtgg

SEQ ID NO: 1928 - DNA, 23 bp, Homo sapiens
ctaagtccagtgggtgtctgagg

SEQ ID NO: 1929 - DNA, 23 bp, Homo sapiens
ttaaaacaagaaagctctagtgg

SEQ ID NO: 1930 - DNA, 23 bp, Homo sapiens
ataagtatgtttggcagtggtgg

SEQ ID NO: 1931 - DNA, 23 bp, Homo sapiens
tttatgtttagaatatagaaggg

SEQ ID NO: 1932 - DNA, 23 bp, Homo sapiens
agtgctttaggctatttcccagg

SEQ ID NO: 1933 - DNA, 23 bp, Homo sapiens
aatcctcaactcctcttcaaggg

SEQ ID NO: 1934 - DNA, 23 bp, Homo sapiens
acgtgcatgctttaaggaagggg

SEQ ID NO: 1935 - DNA, 23 bp, Homo sapiens
aaagggaaaataataagctaggg

SEQ ID NO: 1936 - DNA, 23 bp, Homo sapiens
ttactaatatctatatagagtgg

SEQ ID NO: 1937 - DNA, 23 bp, Homo sapiens
gccatacttctgtcaaccactgg

SEQ ID NO: 1938 - DNA, 23 bp, Homo sapiens
acatcgttatgtgaatgccatgg

SEQ ID NO: 1939 - DNA, 23 bp, Homo sapiens
catttaatagatgtgagtgtagg

SEQ ID NO: 1940 - DNA, 23 bp, Homo sapiens
cacgtagtgaagaaatgcaatgg

SEQ ID NO: 1941 - DNA, 23 bp, Homo sapiens
ggccttgtagttatcccacatgg

SEQ ID NO: 1942 - DNA, 23 bp, Homo sapiens
ttggattcagagagaggcaatgg

SEQ ID NO: 1943 - DNA, 23 bp, Homo sapiens
gagttgtgactcgctaaagaagg

SEQ ID NO: 1944 - DNA, 23 bp, Homo sapiens
aagcttctatctgattgaaaggg

SEQ ID NO: 1945 - DNA, 23 bp, Homo sapiens
tcatccgtattttataggaaagg

SEQ ID NO: 1946 - DNA, 23 bp, Homo sapiens
tatcacctcagagatatgctagg

SEQ ID NO: 1947 - DNA, 23 bp, Homo sapiens
aatttgggcatacttgtatgggg

SEQ ID NO: 1948 - DNA, 23 bp, Homo sapiens
aacgcgtttaggaaaaatagagg

SEQ ID NO: 1949 - DNA, 23 bp, Homo sapiens
attttctgatgaaaattcagtgg

SEQ ID NO: 1950 - DNA, 23 bp, Homo sapiens
ataatcttttgctagggctgagg

SEQ ID NO: 1951 - DNA, 23 bp, Homo sapiens
tttcagtgaggtaaccagccagg

SEQ ID NO: 1952 - DNA, 23 bp, Homo sapiens
catgtacctttcaagggagtagg

SEQ ID NO: 1953 - DNA, 23 bp, Homo sapiens
agatttctaaatggctacacagg

SEQ ID NO: 1954 - DNA, 23 bp, Homo sapiens
ttaaagcctagagcatagacagg

SEQ ID NO: 1955 - DNA, 23 bp, Homo sapiens
acccaggtagtatcgctgacagg

SEQ ID NO: 1956 - DNA, 23 bp, Homo sapiens
aatcctcctgaaagtttgcatgg

SEQ ID NO: 1957 - DNA, 23 bp, Homo sapiens
tcctcagatgtctatgcgaaagg

SEQ ID NO: 1958 - DNA, 23 bp, Homo sapiens
cagtagctcagaatgagataggg

SEQ ID NO: 1959 - DNA, 23 bp, Homo sapiens
ccaaaagcagagtggaagaaggg

SEQ ID NO: 1960 - DNA, 23 bp, Homo sapiens
atcatttctccatggttgggtgg

SEQ ID NO: 1961 - DNA, 23 bp, Homo sapiens
tttaacataaaaagtagaagagg

SEQ ID NO: 1962 - DNA, 23 bp, Homo sapiens
cttttttaaggatgaaggagggg

SEQ ID NO: 1963 - DNA, 23 bp, Homo sapiens
cttttattaaactacacaagtgg

SEQ ID NO: 1964 - DNA, 23 bp, Homo sapiens
caaacttgctgtaaccctatggg

SEQ ID NO: 1965 - DNA, 23 bp, Homo sapiens
aaaattctctaataaactggagg

SEQ ID NO: 1966 - DNA, 23 bp, Homo sapiens
atttccccgttttcatactgagg

SEQ ID NO: 1967 - DNA, 23 bp, Homo sapiens
tattgcatgactcaaatacatgg

SEQ ID NO: 1968 - DNA, 23 bp, Homo sapiens
tccaattacaataatcaaagagg

SEQ ID NO: 1969 - DNA, 23 bp, Homo sapiens
tcgagccccgcgagaaggagggg

SEQ ID NO: 1970 - DNA, 23 bp, Homo sapiens
gtatatgaaaaggtgttaagtgg

SEQ ID NO: 1971 - DNA, 23 bp, Homo sapiens
catatgcctcactaaggtcctgg

SEQ ID NO: 1972 - DNA, 23 bp, Homo sapiens
gagaactgtttgtatggctaggg

SEQ ID NO: 1973 - DNA, 23 bp, Homo sapiens
tcagacagactatcattcaaagg

SEQ ID NO: 1974 - DNA, 23 bp, Homo sapiens
actctcctgaagcataaacttgg

SEQ ID NO: 1975 - DNA, 23 bp, Homo sapiens
ataatcttacattctccccatgg

SEQ ID NO: 1976 - DNA, 23 bp, Homo sapiens
atattataaattaggccataggg

SEQ ID NO: 1977 - DNA, 23 bp, Homo sapiens
atgtacctcatttgctaacgtgg

SEQ ID NO: 1978 - DNA, 23 bp, Homo sapiens
tagtgagtgtcctcattctaggg

SEQ ID NO: 1979 - DNA, 23 bp, Homo sapiens
tctgtgtttctggatgaaatggg

SEQ ID NO: 1980 - DNA, 23 bp, Homo sapiens
agacgtacataaactaccaatgg

SEQ ID NO: 1981 - DNA, 23 bp, Homo sapiens
acaattggctcctagaaggttgg

SEQ ID NO: 1982 - DNA, 23 bp, Homo sapiens
ttccgcccctccttctcgcgggg

SEQ ID NO: 1983 - DNA, 23 bp, Homo sapiens
tatggaccaagaataatgaatgg

SEQ ID NO: 1984 - DNA, 23 bp, Homo sapiens
gctatgcattagaaggaagtagg

SEQ ID NO: 1985 - DNA, 23 bp, Homo sapiens
atttcagctgctcaaatggaagg

SEQ ID NO: 1986 - DNA, 23 bp, Homo sapiens
tcttatgtaaagaacacaaaagg

SEQ ID NO: 1987 - DNA, 23 bp, Homo sapiens
ggcttcatgcaaaatactgaagg

SEQ ID NO: 1988 - DNA, 23 bp, Homo sapiens
ctcataggcaatgtattccaagg

SEQ ID NO: 1989 - DNA, 23 bp, Homo sapiens
gaaattcctgtaaaacccatagg

SEQ ID NO: 1990 - DNA, 23 bp, Homo sapiens
agttgtttctcaggcatctgtgg

SEQ ID NO: 1991 - DNA, 23 bp, Homo sapiens
ccatcaacccagtattatgtagg

SEQ ID NO: 1992 - DNA, 23 bp, Homo sapiens
atttgtaatacaaattacgatgg

SEQ ID NO: 1993 - DNA, 23 bp, Homo sapiens
ctctgagcaacatattacaatgg

SEQ ID NO: 1994 - DNA, 23 bp, Homo sapiens
caacacccagattaaggcatcgg

SEQ ID NO: 1995 - DNA, 23 bp, Homo sapiens
caaaaccccaaagattgttacgg

SEQ ID NO: 1996 - DNA, 23 bp, Homo sapiens
acatgtcatatgctttcccatgg

SEQ ID NO: 1997 - DNA, 23 bp, Homo sapiens
atactaaacaattgataccatgg

SEQ ID NO: 1998 - DNA, 23 bp, Homo sapiens
tgtggtcaccaagtcacctgtgg

SEQ ID NO: 1999 - DNA, 23 bp, Homo sapiens
tgagtattaattaggacacttgg

SEQ ID NO: 2000 - DNA, 23 bp, Homo sapiens
caaatcaagcaacactcacacgg

SEQ ID NO: 2001 - DNA, 23 bp, Homo sapiens
actcatctgtaatttcaagttgg

SEQ ID NO: 2002 - DNA, 23 bp, Homo sapiens
aactctatagtgataacagctgg

SEQ ID NO: 2003 - DNA, 23 bp, Homo sapiens
gtaacatgttttgattgaaacgg

SEQ ID NO: 2004 - DNA, 23 bp, Homo sapiens
aagtcatgtttttcaaacaacgg

SEQ ID NO: 2005 - DNA, 23 bp, Homo sapiens
cctgcatttaacgcattaggagg

SEQ ID NO: 2006 - DNA, 23 bp, Homo sapiens
atatgtatgtatatattcatggg

SEQ ID NO: 2007 - DNA, 23 bp, Homo sapiens
aggcggtagctatttaggcttgg

SEQ ID NO: 2008 - DNA, 23 bp, Homo sapiens
cagcatatgctaattgcgtatgg

SEQ ID NO: 2009 - DNA, 23 bp, Homo sapiens
tatattatataaggcctggatgg

SEQ ID NO: 2010 - DNA, 23 bp, Homo sapiens
agaaaattagttcttgcctaggg

SEQ ID NO: 2011 - DNA, 23 bp, Homo sapiens
tctggctgactaattagcaatgg

SEQ ID NO: 2012 - DNA, 23 bp, Homo sapiens
acagaagtaagcgggttagaggg

SEQ ID NO: 2013 - DNA, 23 bp, Homo sapiens
ggaaagtcctttttttacaaggg

SEQ ID NO: 2014 - DNA, 23 bp, Homo sapiens
gctagaatgactctcagcctagg

SEQ ID NO: 2015 - DNA, 23 bp, Homo sapiens
aagaaaccattgctgtgagaggg

SEQ ID NO: 2016 - DNA, 23 bp, Homo sapiens
ggaagggtggaataatgtctagg

SEQ ID NO: 2017 - DNA, 23 bp, Homo sapiens
ctaaccattatagaattcctggg

SEQ ID NO: 2018 - DNA, 23 bp, Homo sapiens
ctacgctctttgcagcctcaagg

SEQ ID NO: 2019 - DNA, 23 bp, Homo sapiens
tctgagcagagatcaactgctgg

SEQ ID NO: 2020 - DNA, 23 bp, Homo sapiens
gcaatgctatatagatgagcagg

SEQ ID NO: 2021 - DNA, 23 bp, Homo sapiens
agtcaatcagctgaaagccttgg

SEQ ID NO: 2022 - DNA, 23 bp, Homo sapiens
acctgtatatgtaatttccaagg

SEQ ID NO: 2023 - DNA, 23 bp, Homo sapiens
tacctgtggtctaaaaaagtcgg

SEQ ID NO: 2024 - DNA, 23 bp, Homo sapiens
tgcatatcctcagggttcatcgg

SEQ ID NO: 2025 - DNA, 23 bp, Homo sapiens
tcctgggagctaatcaaaagagg

SEQ ID NO: 2026 - DNA, 23 bp, Homo sapiens
gtaaatcctctcattaagatggg

SEQ ID NO: 2027 - DNA, 23 bp, Homo sapiens
agaagtcagttcgaactccctgg

SEQ ID NO: 2028 - DNA, 23 bp, Homo sapiens
gaaaggataatataatgagttgg

SEQ ID NO: 2029 - DNA, 23 bp, Homo sapiens
aatatggcagataaattgcaagg

SEQ ID NO: 2030 - DNA, 23 bp, Homo sapiens
actctttaaccaaaaggctgtgg

SEQ ID NO: 2031 - DNA, 23 bp, Homo sapiens
attctgataaccccttcgaatgg

SEQ ID NO: 2032 - DNA, 23 bp, Homo sapiens
gtgcctaccaagagaagaagagg

SEQ ID NO: 2033 - DNA, 23 bp, Homo sapiens
tgtgggaaatcggagatggcagg

SEQ ID NO: 2034 - DNA, 23 bp, Homo sapiens
tgctatctaggtttaagtgaggg

SEQ ID NO: 2035 - DNA, 23 bp, Homo sapiens
attttgatgtcattaccataggg

SEQ ID NO: 2036 - DNA, 23 bp, Homo sapiens
tgaaaacagttacctcccattgg

SEQ ID NO: 2037 - DNA, 23 bp, Homo sapiens
ctgatttagtagacgctgaaggg

SEQ ID NO: 2038 - DNA, 23 bp, Homo sapiens
acttggcaatccaagcaagatgg

SEQ ID NO: 2039 - DNA, 23 bp, Homo sapiens
aaagattcatcccagtttagcgg

SEQ ID NO: 2040 - DNA, 23 bp, Homo sapiens
tatatgatagtctattaacttgg

SEQ ID NO: 2041 - DNA, 23 bp, Homo sapiens
tccagctaggacaggcctgaggg

SEQ ID NO: 2042 - DNA, 23 bp, Homo sapiens
tatggtactgggattgtagtggg

SEQ ID NO: 2043 - DNA, 23 bp, Homo sapiens
attagaaacacaacacagccagg

SEQ ID NO: 2044 - DNA, 23 bp, Homo sapiens
ataatgcacaaatataaagaagg

SEQ ID NO: 2045 - DNA, 23 bp, Homo sapiens
ggtaaacgtggcagaaagcaggg

SEQ ID NO: 2046 - DNA, 23 bp, Homo sapiens
tatgccttaatttcagcctgtgg

SEQ ID NO: 2047 - DNA, 23 bp, Homo sapiens
gctattccaggggccagatgggg

SEQ ID NO: 2048 - DNA, 23 bp, Homo sapiens
aacagaattcactatctctaggg

SEQ ID NO: 2049 - DNA, 23 bp, Homo sapiens
atatttactgaacattacattgg

SEQ ID NO: 2050 - DNA, 23 bp, Homo sapiens
ctttctagctgaggatgagtagg

SEQ ID NO: 2051 - DNA, 23 bp, Homo sapiens
aacaagaactaaatttgccaggg

SEQ ID NO: 2052 - DNA, 23 bp, Homo sapiens
ggttctgtttgacttttgaaagg

SEQ ID NO: 2053 - DNA, 23 bp, Homo sapiens
atgtatggcagaagaactaaagg

SEQ ID NO: 2054 - DNA, 23 bp, Homo sapiens
tgagctctgtttgatgaaggagg

SEQ ID NO: 2055 - DNA, 23 bp, Homo sapiens
aatacaaaacaaacacaagtagg

SEQ ID NO: 2056 - DNA, 23 bp, Homo sapiens
gcttctagtttcactaggaacgg

SEQ ID NO: 2057 - DNA, 23 bp, Homo sapiens
cataactctgacataatcgttgg

SEQ ID NO: 2058 - DNA, 23 bp, Homo sapiens
acttacctagttatttactctgg

SEQ ID NO: 2059 - DNA, 23 bp, Homo sapiens
agtcctttctacagttcccaagg

SEQ ID NO: 2060 - DNA, 23 bp, Homo sapiens
cccaggaaacaacttgaaagagg

SEQ ID NO: 2061 - DNA, 23 bp, Homo sapiens
ctatcttctagagagttgacagg

SEQ ID NO: 2062 - DNA, 23 bp, Homo sapiens
tctcaattagtacaaagccatgg

SEQ ID NO: 2063 - DNA, 23 bp, Homo sapiens
acatattcaaaaatagaggttgg

SEQ ID NO: 2064 - DNA, 23 bp, Homo sapiens
aattagttcttgcctagggaagg

SEQ ID NO: 2065 - DNA, 23 bp, Homo sapiens
cagtggttaggaggaaggagagg

SEQ ID NO: 2066 - DNA, 23 bp, Homo sapiens
ttttctaagtggacttaggaagg

SEQ ID NO: 2067 - DNA, 23 bp, Homo sapiens
tgtgactgatatgaattcaaggg

SEQ ID NO: 2068 - DNA, 23 bp, Homo sapiens
gcttgatagtatttcaccacagg

SEQ ID NO: 2069 - DNA, 23 bp, Homo sapiens
ttcaggttctcgatgatgcaagg

SEQ ID NO: 2070 - DNA, 23 bp, Homo sapiens
tcgctaagcttgtcaccacatgg

SEQ ID NO: 2071 - DNA, 23 bp, Homo sapiens
ggaaaattgcagaatgcagaggg

SEQ ID NO: 2072 - DNA, 23 bp, Homo sapiens
tcatccagcaccattaaagaagg

SEQ ID NO: 2073 - DNA, 23 bp, Homo sapiens
ctaacttaccttacttgcaaagg

SEQ ID NO: 2074 - DNA, 23 bp, Homo sapiens
ataaatggagtaaaagttgaggg

SEQ ID NO: 2075 - DNA, 23 bp, Homo sapiens
aacgttataggcccataaaaggg

SEQ ID NO: 2076 - DNA, 23 bp, Homo sapiens
tatcaaatttgttaaacaggtgg

SEQ ID NO: 2077 - DNA, 23 bp, Homo sapiens
aagattgcgaacatagcaaaagg

SEQ ID NO: 2078 - DNA, 23 bp, Homo sapiens
gttttcaaatttaagccagaggg

SEQ ID NO: 2079 - DNA, 23 bp, Homo sapiens
agtgtgcttcttatgtcctgagg

SEQ ID NO: 2080 - DNA, 23 bp, Homo sapiens
aatccaaacagtgttcatatggg

SEQ ID NO: 2081 - DNA, 23 bp, Homo sapiens
gtgccgtgctacttaagagaagg

SEQ ID NO: 2082 - DNA, 23 bp, Homo sapiens
gtataatctatttgagggcaggg

SEQ ID NO: 2083 - DNA, 23 bp, Homo sapiens
aaacttcatgtacctttcaaggg

SEQ ID NO: 2084 - DNA, 23 bp, Homo sapiens
ttattgctgaagcatgtgatagg

SEQ ID NO: 2085 - DNA, 23 bp, Homo sapiens
ctacaatcccagtaccatacagg

SEQ ID NO: 2086 - DNA, 23 bp, Homo sapiens
acctcagaggttacaaaggaggg

SEQ ID NO: 2087 - DNA, 23 bp, Homo sapiens
atataaactaaatttttccaagg

SEQ ID NO: 2088 - DNA, 23 bp, Homo sapiens
gaatcattattatcaacagaagg

SEQ ID NO: 2089 - DNA, 23 bp, Homo sapiens
gatcacaaaatatctctcaaagg

SEQ ID NO: 2090 - DNA, 23 bp, Homo sapiens
ttcatggtcctcgatgctgaggg

SEQ ID NO: 2091 - DNA, 23 bp, Homo sapiens
ttttttcccctgagttactgagg

SEQ ID NO: 2092 - DNA, 23 bp, Homo sapiens
tgcaatgtgtggtatatgagtgg

SEQ ID NO: 2093 - DNA, 23 bp, Homo sapiens
cagaaatgagaacacagggttgg

SEQ ID NO: 2094 - DNA, 23 bp, Homo sapiens
ttctaatatccctctcccaaagg

SEQ ID NO: 2095 - DNA, 23 bp, Homo sapiens
tggcataatcatttgcccatggg

SEQ ID NO: 2096 - DNA, 23 bp, Homo sapiens
ccccatgtgggataactacaagg

SEQ ID NO: 2097 - DNA, 23 bp, Homo sapiens
gtaggatcatctgccgctgatgg

SEQ ID NO: 2098 - DNA, 23 bp, Homo sapiens
agtggcttagctgtaaatagagg

SEQ ID NO: 2099 - DNA, 23 bp, Homo sapiens
gtagacatagagctcagaatagg

SEQ ID NO: 2100 - DNA, 23 bp, Homo sapiens
ctttttagcaacctattccaagg

SEQ ID NO: 2101 - DNA, 23 bp, Homo sapiens
agacacagctataaggaaagagg

SEQ ID NO: 2102 - DNA, 23 bp, Homo sapiens
ttaatgggaattgacaaaaaggg

SEQ ID NO: 2103 - DNA, 23 bp, Homo sapiens
ttctattttcaggaacctaaggg

SEQ ID NO: 2104 - DNA, 23 bp, Homo sapiens
ttactcttattgagaaagctcgg

SEQ ID NO: 2105 - DNA, 23 bp, Homo sapiens
atttgttacaaaaatcaagatgg

SEQ ID NO: 2106 - DNA, 23 bp, Homo sapiens
aaatacaccttggaatatcaggg

SEQ ID NO: 2107 - DNA, 23 bp, Homo sapiens
gtcacatgatgcaggcagctggg

SEQ ID NO: 2108 - DNA, 23 bp, Homo sapiens
gatgaggagaagggtaggagagg

SEQ ID NO: 2109 - DNA, 23 bp, Homo sapiens
catttttcagagaagaagagagg

SEQ ID NO: 2110 - DNA, 23 bp, Homo sapiens
ttattggaatttgttatggaggg

SEQ ID NO: 2111 - DNA, 23 bp, Homo sapiens
catttgctttgccactcacatgg

SEQ ID NO: 2112 - DNA, 23 bp, Homo sapiens
ctttccctagaaaaaaaatgtgg

SEQ ID NO: 2113 - DNA, 23 bp, Homo sapiens
gaaaacaatttctcaatccacgg

SEQ ID NO: 2114 - DNA, 23 bp, Homo sapiens
gctatttttaggtttggggtagg

SEQ ID NO: 2115 - DNA, 23 bp, Homo sapiens
catctgatttcaaatctgcatgg

SEQ ID NO: 2116 - DNA, 23 bp, Homo sapiens
ataaggagatacaaaacagatgg

SEQ ID NO: 2117 - DNA, 23 bp, Homo sapiens
gtgttagatacaatgcaggccgg

SEQ ID NO: 2118 - DNA, 23 bp, Homo sapiens
cctcttataaagacgagagcagg

SEQ ID NO: 2119 - DNA, 23 bp, Homo sapiens
gccaaatagggatacctcaaagg

SEQ ID NO: 2120 - DNA, 23 bp, Homo sapiens
ttatagttttatctggcctgggg

SEQ ID NO: 2121 - DNA, 23 bp, Homo sapiens
gggagcagaagaattagaaatgg

SEQ ID NO: 2122 - DNA, 23 bp, Homo sapiens
agggacaaaataaagtcagttgg

SEQ ID NO: 2123 - DNA, 23 bp, Homo sapiens
tgtgaaacataccaaaggaaagg

SEQ ID NO: 2124 - DNA, 23 bp, Homo sapiens
ataattatgccatattcagatgg

SEQ ID NO: 2125 - DNA, 23 bp, Homo sapiens
tgaaccttccctcaatactaagg

SEQ ID NO: 2126 - DNA, 23 bp, Homo sapiens
cagctgggtcgacatcaacttgg

SEQ ID NO: 2127 - DNA, 23 bp, Homo sapiens
gtattaagcgaagccatggcagg

SEQ ID NO: 2128 - DNA, 23 bp, Homo sapiens
acgtagtgaagaaatgcaatggg

SEQ ID NO: 2129 - DNA, 23 bp, Homo sapiens
gatgaagtttggacaatggatgg

SEQ ID NO: 2130 - DNA, 23 bp, Homo sapiens
agcagctgcagagtgttctgagg

SEQ ID NO: 2131 - DNA, 23 bp, Homo sapiens
atgctaacctgaaattgtatggg

SEQ ID NO: 2132 - DNA, 23 bp, Homo sapiens
ttaaggtgcgtataaactcatgg

SEQ ID NO: 2133 - DNA, 23 bp, Homo sapiens
agctaaagagtaaatcaggcagg

SEQ ID NO: 2134 - DNA, 23 bp, Homo sapiens
ggtgtttcttacctgatggaagg

SEQ ID NO: 2135 - DNA, 23 bp, Homo sapiens
catcaaggtgaatgggaaagtgg

SEQ ID NO: 2136 - DNA, 23 bp, Homo sapiens
gtaatgctttctcttgtgaaagg

SEQ ID NO: 2137 - DNA, 23 bp, Homo sapiens
gaaaaaatgagagctgaagatgg

SEQ ID NO: 2138 - DNA, 23 bp, Homo sapiens
tgttttcatgcatatcctcaggg

SEQ ID NO: 2139 - DNA, 23 bp, Homo sapiens
aaatctaagtggaagtccaaggg

SEQ ID NO: 2140 - DNA, 23 bp, Homo sapiens
ccaggaaaaggggttcaagaagg

SEQ ID NO: 2141 - DNA, 23 bp, Homo sapiens
ctactttttcaggtattgtgggg

SEQ ID NO: 2142 - DNA, 23 bp, Homo sapiens
tatgtgtctacgttgctggatgg

SEQ ID NO: 2143 - DNA, 23 bp, Homo sapiens
tttcagcttctagtttcactagg

SEQ ID NO: 2144 - DNA, 23 bp, Homo sapiens
gcagtataggctttaaagtaggg

SEQ ID NO: 2145 - DNA, 23 bp, Homo sapiens
gttggactcagaaaccagattgg

SEQ ID NO: 2146 - DNA, 23 bp, Homo sapiens
tggtcctcatcaaagtccgctgg

SEQ ID NO: 2147 - DNA, 23 bp, Homo sapiens
aagtcactgatatttaatagagg

SEQ ID NO: 2148 - DNA, 23 bp, Homo sapiens
gtacatcacagcaaaataagtgg

SEQ ID NO: 2149 - DNA, 23 bp, Homo sapiens
cattttgctgaatttaattgggg

SEQ ID NO: 2150 - DNA, 23 bp, Homo sapiens
aataccagataaatgtagctcgg

SEQ ID NO: 2151 - DNA, 23 bp, Homo sapiens
gccacctgctcttatgcgtaggg

SEQ ID NO: 2152 - DNA, 23 bp, Homo sapiens
taaccagtaaccgctaaaagagg

SEQ ID NO: 2153 - DNA, 23 bp, Homo sapiens
tcagaagcaggcttccctaaagg

SEQ ID NO: 2154 - DNA, 23 bp, Homo sapiens
tatctccaacaacggaaaagagg

SEQ ID NO: 2155 - DNA, 23 bp, Homo sapiens
atataaatataagggaatgttgg

SEQ ID NO: 2156 - DNA, 23 bp, Homo sapiens
ctcgagccccgcgagaaggaggg

SEQ ID NO: 2157 - DNA, 23 bp, Homo sapiens
tcttaaagacagtatacaaacgg

SEQ ID NO: 2158 - DNA, 23 bp, Homo sapiens
atttgaggggatgtcacaatggg

SEQ ID NO: 2159 - DNA, 23 bp, Homo sapiens
gttacttagtaattctctgtagg

SEQ ID NO: 2160 - DNA, 23 bp, Homo sapiens
tatcagcagatccatctgcttgg

SEQ ID NO: 2161 - DNA, 23 bp, Homo sapiens
tttatagtccatcatttgcaggg

SEQ ID NO: 2162 - DNA, 23 bp, Homo sapiens
tttcatgtagttgggatcaaggg

SEQ ID NO: 2163 - DNA, 23 bp, Homo sapiens
gaattttgtcacttagagaaggg

SEQ ID NO: 2164 - DNA, 23 bp, Homo sapiens
attatttgctagcctcatgtagg

SEQ ID NO: 2165 - DNA, 23 bp, Homo sapiens
cattcatttggcctttggagagg

SEQ ID NO: 2166 - DNA, 23 bp, Homo sapiens
cctaaaagttagtgcacaagagg

SEQ ID NO: 2167 - DNA, 23 bp, Homo sapiens
ttgcctgctcttcaggtgcgtgg

SEQ ID NO: 2168 - DNA, 23 bp, Homo sapiens
gagaaagaacacctgtgcattgg

SEQ ID NO: 2169 - DNA, 23 bp, Homo sapiens
ttatctgtgaatcacccaatggg

SEQ ID NO: 2170 - DNA, 23 bp, Homo sapiens
cctccctaataccagtgaaaggg

SEQ ID NO: 2171 - DNA, 23 bp, Homo sapiens
tcttttttaaggatgaaggaggg

SEQ ID NO: 2172 - DNA, 23 bp, Homo sapiens
gagttattttaaatgtatagggg

SEQ ID NO: 2173 - DNA, 23 bp, Homo sapiens
gagacagaaatgaaaaatcaggg

SEQ ID NO: 2174 - DNA, 23 bp, Homo sapiens
atcttttcttgagtagcgaaagg

SEQ ID NO: 2175 - DNA, 23 bp, Homo sapiens
actttggtactattccatagtgg

SEQ ID NO: 2176 - DNA, 23 bp, Homo sapiens
aagtttgaagaacttttaccagg

SEQ ID NO: 2177 - DNA, 23 bp, Homo sapiens
agtgtaaataaaccaactgatgg

SEQ ID NO: 2178 - DNA, 23 bp, Homo sapiens
aaacatttcttgccattcaaggg

SEQ ID NO: 2179 - DNA, 23 bp, Homo sapiens
tatttcagagaaaaaatatgtgg

SEQ ID NO: 2180 - DNA, 23 bp, Homo sapiens
aaggcagaagttttgccactggg

SEQ ID NO: 2181 - DNA, 23 bp, Homo sapiens
agttctgccaggtttatgtacgg

SEQ ID NO: 2182 - DNA, 23 bp, Homo sapiens
ttaattaaaaggaacgaaagtgg

SEQ ID NO: 2183 - DNA, 23 bp, Homo sapiens
agggatacttaaccaaaagctgg

SEQ ID NO: 2184 - DNA, 23 bp, Homo sapiens
atataggagacgtaatatatggg

SEQ ID NO: 2185 - DNA, 23 bp, Homo sapiens
ctcaggctatggaggagactggg

SEQ ID NO: 2186 - DNA, 23 bp, Homo sapiens
aaaacaatggaactgggccgtgg

SEQ ID NO: 2187 - DNA, 23 bp, Homo sapiens
ctaggccagataaggagccctgg

SEQ ID NO: 2188 - DNA, 23 bp, Homo sapiens
tcaatcttagcaccagtgccagg

SEQ ID NO: 2189 - DNA, 23 bp, Homo sapiens
tatagaatagctatatattgagg

SEQ ID NO: 2190 - DNA, 23 bp, Homo sapiens
ggaagttaggaggagcaagctgg

SEQ ID NO: 2191 - DNA, 23 bp, Homo sapiens
catcccctgcttattaggatagg

SEQ ID NO: 2192 - DNA, 23 bp, Homo sapiens
cccattctctagacttgcatagg

SEQ ID NO: 2193 - DNA, 23 bp, Homo sapiens
acactcatcatgggggaggaggg

SEQ ID NO: 2194 - DNA, 23 bp, Homo sapiens
gttctgccaggtttatgtacggg

SEQ ID NO: 2195 - DNA, 23 bp, Homo sapiens
tattacaataataaattcaaggg

SEQ ID NO: 2196 - DNA, 23 bp, Homo sapiens
cactgtcccttaaagctgatcgg

SEQ ID NO: 2197 - DNA, 23 bp, Homo sapiens
cgagcctcattcttttgtagtgg

SEQ ID NO: 2198 - DNA, 23 bp, Homo sapiens
aacttccgtaacaatctttgggg

SEQ ID NO: 2199 - DNA, 23 bp, Homo sapiens
tctccccgatgccttaatctggg

SEQ ID NO: 2200 - DNA, 23 bp, Homo sapiens
ttaaagaaagaaattaggaaagg

SEQ ID NO: 2201 - DNA, 23 bp, Homo sapiens
ggaaatgaattggtgacagaagg

SEQ ID NO: 2202 - DNA, 23 bp, Homo sapiens
attataagcatggaccgtgctgg

SEQ ID NO: 2203 - DNA, 23 bp, Homo sapiens
aacaacttcagattagtgtaggg

SEQ ID NO: 2204 - DNA, 23 bp, Homo sapiens
tctacttaaaaaggttaaggagg

SEQ ID NO: 2205 - DNA, 23 bp, Homo sapiens
gctttctaccctaacaatagagg

SEQ ID NO: 2206 - DNA, 23 bp, Homo sapiens
tctccttttgtcttttagtgggg

SEQ ID NO: 2207 - DNA, 23 bp, Homo sapiens
gattctggctactgtttgagagg

SEQ ID NO: 2208 - DNA, 23 bp, Homo sapiens
acagcagtcctcagtaactcagg

SEQ ID NO: 2209 - DNA, 23 bp, Homo sapiens
cttaaaatgttaagtactgaggg

SEQ ID NO: 2210 - DNA, 23 bp, Homo sapiens
tatgtttttaagagaagcaacgg

SEQ ID NO: 2211 - DNA, 23 bp, Homo sapiens
gtagcaatatttcagttccaagg

SEQ ID NO: 2212 - DNA, 23 bp, Homo sapiens
gtttgtgccactttaaacactgg

SEQ ID NO: 2213 - DNA, 23 bp, Homo sapiens
aggaacaacagagcattcaatgg

SEQ ID NO: 2214 - DNA, 23 bp, Homo sapiens
cctaccatttcagtcttggatgg

SEQ ID NO: 2215 - DNA, 23 bp, Homo sapiens
tattacactttgttgtccgcagg

SEQ ID NO: 2216 - DNA, 23 bp, Homo sapiens
tgagattcatctcctggcactgg

SEQ ID NO: 2217 - DNA, 23 bp, Homo sapiens
cgttacaggatactgtaaaaggg

SEQ ID NO: 2218 - DNA, 23 bp, Homo sapiens
gagtcatccaaatatatcccagg

SEQ ID NO: 2219 - DNA, 23 bp, Homo sapiens
caggtagattgagccggtgaggg

SEQ ID NO: 2220 - DNA, 23 bp, Homo sapiens
tcccagtgagtctaacagccagg

SEQ ID NO: 2221 - DNA, 23 bp, Homo sapiens
accaatctaaacatttcctaagg

SEQ ID NO: 2222 - DNA, 23 bp, Homo sapiens
acttgaggccatgaaattgaggg

SEQ ID NO: 2223 - DNA, 23 bp, Homo sapiens
tcactgtctaagctagtactagg

SEQ ID NO: 2224 - DNA, 23 bp, Homo sapiens
atttatttagtgcccggaagggg

SEQ ID NO: 2225 - DNA, 23 bp, Homo sapiens
cttggaattcctatgccagcagg

SEQ ID NO: 2226 - DNA, 23 bp, Homo sapiens
cagctagtttttttttcaggggg

SEQ ID NO: 2227 - DNA, 23 bp, Homo sapiens
agcgttttctcgtgttcaagagg

SEQ ID NO: 2228 - DNA, 23 bp, Homo sapiens
cattagtcatggagtcctaaggg

SEQ ID NO: 2229 - DNA, 23 bp, Homo sapiens
cagaaacgctctttcaatggtgg

SEQ ID NO: 2230 - DNA, 23 bp, Homo sapiens
aaatatattacaacttcccgtgg

SEQ ID NO: 2231 - DNA, 23 bp, Homo sapiens
tgatgttatctatttagtacggg

SEQ ID NO: 2232 - DNA, 23 bp, Homo sapiens
attgctaagcatgccctgtaggg

SEQ ID NO: 2233 - DNA, 23 bp, Homo sapiens
gggtgatagtcgccagagaaggg

SEQ ID NO: 2234 - DNA, 23 bp, Homo sapiens
tccaaatgatcaattttccatgg

SEQ ID NO: 2235 - DNA, 23 bp, Homo sapiens
gggtagatacattttatgagtgg

SEQ ID NO: 2236 - DNA, 23 bp, Homo sapiens
tatggtgtgccacttggaaaggg

SEQ ID NO: 2237 - DNA, 23 bp, Homo sapiens
cattttatagaagttgaacatgg

SEQ ID NO: 2238 - DNA, 23 bp, Homo sapiens
ttatctcaaggaataaatagagg

SEQ ID NO: 2239 - DNA, 23 bp, Homo sapiens
agaatgggaggataataggatgg

SEQ ID NO: 2240 - DNA, 23 bp, Homo sapiens
tgtataagtatgtttggcagtgg

SEQ ID NO: 2241 - DNA, 23 bp, Homo sapiens
gatgcacattgatttaacttcgg

SEQ ID NO: 2242 - DNA, 23 bp, Homo sapiens
gatttcaaacagaaaccagcagg

SEQ ID NO: 2243 - DNA, 23 bp, Homo sapiens
gcaaggaaattacagacgttagg

SEQ ID NO: 2244 - DNA, 23 bp, Homo sapiens
atttcgttgacccttaactaggg

SEQ ID NO: 2245 - DNA, 23 bp, Homo sapiens
cagctgtgtaacataaaagctgg

SEQ ID NO: 2246 - DNA, 23 bp, Homo sapiens
ctcatttgcatggctctacgtgg

SEQ ID NO: 2247 - DNA, 23 bp, Homo sapiens
acattgactgtaaagcgaatggg

SEQ ID NO: 2248 - DNA, 23 bp, Homo sapiens
ccttgtctgtgttacagcaatgg

SEQ ID NO: 2249 - DNA, 23 bp, Homo sapiens
ataagctcttggttttctgaagg

SEQ ID NO: 2250 - DNA, 23 bp, Homo sapiens
aagctgtatagaatttaaagtgg

SEQ ID NO: 2251 - DNA, 23 bp, Homo sapiens
ttttaatgtgactcaatacatgg

SEQ ID NO: 2252 - DNA, 23 bp, Homo sapiens
tttagctctcaaaagcacattgg

SEQ ID NO: 2253 - DNA, 23 bp, Homo sapiens
atataagaatgacatttactagg

SEQ ID NO: 2254 - DNA, 23 bp, Homo sapiens
aatcttacgccttttagaagagg

SEQ ID NO: 2255 - DNA, 23 bp, Homo sapiens
gagttgggacggataattgaagg

SEQ ID NO: 2256 - DNA, 23 bp, Homo sapiens
tctcgcagttgaaggattcaggg

SEQ ID NO: 2257 - DNA, 23 bp, Homo sapiens
gctcacagtcgcccctatgaggg

SEQ ID NO: 2258 - DNA, 23 bp, Homo sapiens
ctatagccttgactcaccacagg

SEQ ID NO: 2259 - DNA, 23 bp, Homo sapiens
atgcacagaaaataaaatgaagg

SEQ ID NO: 2260 - DNA, 23 bp, Homo sapiens
ttattctgttctaggatgagagg

SEQ ID NO: 2261 - DNA, 23 bp, Homo sapiens
gatccttcctctcataaatgagg

SEQ ID NO: 2262 - DNA, 23 bp, Homo sapiens
tgtttgggatttcagttggaagg

SEQ ID NO: 2263 - DNA, 23 bp, Homo sapiens
cccatgacaaaactttcagccgg

SEQ ID NO: 2264 - DNA, 23 bp, Homo sapiens
cattcggttaattttcaaagagg

SEQ ID NO: 2265 - DNA, 23 bp, Homo sapiens
atttctataatctattgccaagg

SEQ ID NO: 2266 - DNA, 23 bp, Homo sapiens
ggtagcttactgctatttggagg

SEQ ID NO: 2267 - DNA, 23 bp, Homo sapiens
gccgccctcgagctaggacatgg

SEQ ID NO: 2268 - DNA, 23 bp, Homo sapiens
aacttttgattgaatcccaaggg

SEQ ID NO: 2269 - DNA, 23 bp, Homo sapiens
agctttctcaataagagtaaagg

SEQ ID NO: 2270 - DNA, 23 bp, Homo sapiens
tcagcgatactacctgggtatgg

SEQ ID NO: 2271 - DNA, 23 bp, Homo sapiens
tttcatctctgtagatgaggtgg

SEQ ID NO: 2272 - DNA, 23 bp, Homo sapiens
cctatagtgcatgcatgccaggg

SEQ ID NO: 2273 - DNA, 23 bp, Homo sapiens
tataagtcagagggaggagatgg

SEQ ID NO: 2274 - DNA, 23 bp, Homo sapiens
atactgcatggaactcgggtggg

SEQ ID NO: 2275 - DNA, 23 bp, Homo sapiens
ttacatcctatacttggctgagg

SEQ ID NO: 2276 - DNA, 23 bp, Homo sapiens
aatagtgtgggtcaactgaaggg

SEQ ID NO: 2277 - DNA, 23 bp, Homo sapiens
atggaatcaggactataaaaggg

SEQ ID NO: 2278 - DNA, 23 bp, Homo sapiens
tctgaaacacacaacttggatgg

SEQ ID NO: 2279 - DNA, 23 bp, Homo sapiens
tcagattatctgcaacccactgg

SEQ ID NO: 2280 - DNA, 23 bp, Homo sapiens
tgcaaatgatagactcaagaagg

SEQ ID NO: 2281 - DNA, 23 bp, Homo sapiens
tgtcttcttgttaagcgaagtgg

SEQ ID NO: 2282 - DNA, 23 bp, Homo sapiens
gtgcaatgcccagagccataagg

SEQ ID NO: 2283 - DNA, 23 bp, Homo sapiens
atgttctgaaagaacacaaaagg

SEQ ID NO: 2284 - DNA, 23 bp, Homo sapiens
atactattctgaatagtacttgg

SEQ ID NO: 2285 - DNA, 23 bp, Homo sapiens
tttgtaatacaaattacgatggg

SEQ ID NO: 2286 - DNA, 23 bp, Homo sapiens
atttcagtagacttacagaaagg

SEQ ID NO: 2287 - DNA, 23 bp, Homo sapiens
atattgagtaggcagctgtatgg

SEQ ID NO: 2288 - DNA, 23 bp, Homo sapiens
aaatgcagctggagtgagtaggg

SEQ ID NO: 2289 - DNA, 23 bp, Homo sapiens
gagcaatgagtatgtaggaaggg

SEQ ID NO: 2290 - DNA, 23 bp, Homo sapiens
ccataaccaaatgggatgaaagg

SEQ ID NO: 2291 - DNA, 23 bp, Homo sapiens
tgcagggtctggggattctgggg

SEQ ID NO: 2292 - DNA, 23 bp, Homo sapiens
cctgtaactggagacaagaaggg

SEQ ID NO: 2293 - DNA, 23 bp, Homo sapiens
agtctacctggattattgatggg

SEQ ID NO: 2294 - DNA, 23 bp, Homo sapiens
cgtttttattaaatgcaaccagg

SEQ ID NO: 2295 - DNA, 23 bp, Homo sapiens
agtttggagctccattttcaggg

SEQ ID NO: 2296 - DNA, 23 bp, Homo sapiens
tatataaagtttcttggtgaggg

SEQ ID NO: 2297 - DNA, 23 bp, Homo sapiens
atctactctgcatgaagctaggg

SEQ ID NO: 2298 - DNA, 23 bp, Homo sapiens
gactggggaatataaagaaaggg

SEQ ID NO: 2299 - DNA, 23 bp, Homo sapiens
gatccttaaagagaaaacttagg

SEQ ID NO: 2300 - DNA, 23 bp, Homo sapiens
cagacctttgacacttacttcgg

SEQ ID NO: 2301 - DNA, 23 bp, Homo sapiens
caggccatcaaacacccataagg

SEQ ID NO: 2302 - DNA, 23 bp, Homo sapiens
gaagatgtgagctataaaagagg

SEQ ID NO: 2303 - DNA, 23 bp, Homo sapiens
caaatgatctttatgccctaggg

SEQ ID NO: 2304 - DNA, 23 bp, Homo sapiens
tataaaccacacatcacgtatgg

SEQ ID NO: 2305 - DNA, 23 bp, Homo sapiens
ggaagctcacattttttcgaagg

SEQ ID NO: 2306 - DNA, 23 bp, Homo sapiens
atagagaattcatggccctcagg

SEQ ID NO: 2307 - DNA, 23 bp, Homo sapiens
atattccaccttgaaaaagcagg

SEQ ID NO: 2308 - DNA, 23 bp, Homo sapiens
tggaggccttatcaaacaccagg

SEQ ID NO: 2309 - DNA, 23 bp, Homo sapiens
tttctgctcactggtagcgctgg

SEQ ID NO: 2310 - DNA, 23 bp, Homo sapiens
actttcttttgctaagtaggagg

SEQ ID NO: 2311 - DNA, 23 bp, Homo sapiens
gattctacttgtatcatgatggg

SEQ ID NO: 2312 - DNA, 23 bp, Homo sapiens
atatttggcaattataagcatgg

SEQ ID NO: 2313 - DNA, 23 bp, Homo sapiens
ttagagaccgatgagtgaaaggg

SEQ ID NO: 2314 - DNA, 23 bp, Homo sapiens
gttctatctgaataaagccatgg

SEQ ID NO: 2315 - DNA, 23 bp, Homo sapiens
gctttttcctttgagaactgtgg

SEQ ID NO: 2316 - DNA, 23 bp, Homo sapiens
gatgtgttcaaaacattatgagg

SEQ ID NO: 2317 - DNA, 23 bp, Homo sapiens
tcatgccaagttaaagtggttgg

SEQ ID NO: 2318 - DNA, 23 bp, Homo sapiens
ctactctcaattttcagatgcgg

SEQ ID NO: 2319 - DNA, 23 bp, Homo sapiens
attgtttccatctaaagtaaggg

SEQ ID NO: 2320 - DNA, 23 bp, Homo sapiens
actgaaggacagcgagtgcatgg

SEQ ID NO: 2321 - DNA, 23 bp, Homo sapiens
gaatgcttataaagagtggcagg

SEQ ID NO: 2322 - DNA, 23 bp, Homo sapiens
tcctccctaataccagtgaaagg

SEQ ID NO: 2323 - DNA, 23 bp, Homo sapiens
tgttttgcttgaaggaactcagg

SEQ ID NO: 2324 - DNA, 23 bp, Homo sapiens
cattcctaagcatattaaagagg

SEQ ID NO: 2325 - DNA, 23 bp, Homo sapiens
ccaagactgaatcatagaatggg

SEQ ID NO: 2326 - DNA, 23 bp, Homo sapiens
tttaacataaggctttagactgg

SEQ ID NO: 2327 - DNA, 23 bp, Homo sapiens
catggatgtctcttgtcatacgg

SEQ ID NO: 2328 - DNA, 23 bp, Homo sapiens
atttcacctctaaattacactgg

SEQ ID NO: 2329 - DNA, 23 bp, Homo sapiens
ggaaggagcagcagttctgtggg

SEQ ID NO: 2330 - DNA, 23 bp, Homo sapiens
atataaaaggattcagtatgagg

SEQ ID NO: 2331 - DNA, 23 bp, Homo sapiens
tttgaaaatgggtctgagaacgg

SEQ ID NO: 2332 - DNA, 23 bp, Homo sapiens
tcaaagagtaccatataagcggg

SEQ ID NO: 2333 - DNA, 23 bp, Homo sapiens
atgctttagaaacagacaaatgg

SEQ ID NO: 2334 - DNA, 23 bp, Homo sapiens
tgcttagaaagattagttgaggg

SEQ ID NO: 2335 - DNA, 23 bp, Homo sapiens
gagagggagagaaagagaagtgg

SEQ ID NO: 2336 - DNA, 23 bp, Homo sapiens
tattaaagaaaacaaggtgtggg

SEQ ID NO: 2337 - DNA, 23 bp, Homo sapiens
atattaagtatgtgtccaaaagg

SEQ ID NO: 2338 - DNA, 23 bp, Homo sapiens
ggaacagaggcgtaaatagcagg

SEQ ID NO: 2339 - DNA, 23 bp, Homo sapiens
acaatgtcgttcttgagggatgg

SEQ ID NO: 2340 - DNA, 23 bp, Homo sapiens
tgctttattggaggatcacaggg

SEQ ID NO: 2341 - DNA, 23 bp, Homo sapiens
tccttgtccatcccagtacaagg

SEQ ID NO: 2342 - DNA, 23 bp, Homo sapiens
ttactgagaaagtgaatggttgg

SEQ ID NO: 2343 - DNA, 23 bp, Homo sapiens
tctcagtgattctttcgcccagg

SEQ ID NO: 2344 - DNA, 23 bp, Homo sapiens
cttatggattgtttgactggagg

SEQ ID NO: 2345 - DNA, 23 bp, Homo sapiens
tctgacagcccattagagacggg

SEQ ID NO: 2346 - DNA, 23 bp, Homo sapiens
gttgaagtgggcatgtggaaggg

SEQ ID NO: 2347 - DNA, 23 bp, Homo sapiens
cctccaagctaaaaattcatggg

SEQ ID NO: 2348 - DNA, 23 bp, Homo sapiens
ggcatcaatagctaattctaggg

SEQ ID NO: 2349 - DNA, 23 bp, Homo sapiens
tcttttttcaaaattatgccggg

SEQ ID NO: 2350 - DNA, 23 bp, Homo sapiens
aagaagcagaagaaacaaaccgg

SEQ ID NO: 2351 - DNA, 23 bp, Homo sapiens
ttatatgttaacatgatcaaagg

SEQ ID NO: 2352 - DNA, 23 bp, Homo sapiens
atattatcgattaggcctgttgg

SEQ ID NO: 2353 - DNA, 23 bp, Homo sapiens
gacagtggaccacattgtatagg

SEQ ID NO: 2354 - DNA, 23 bp, Homo sapiens
aatttgcagccttttgtagaggg

SEQ ID NO: 2355 - DNA, 23 bp, Homo sapiens
aactcattagaaaactaatgagg

SEQ ID NO: 2356 - DNA, 23 bp, Homo sapiens
tggctctggagattttatagagg

SEQ ID NO: 2357 - DNA, 23 bp, Homo sapiens
ccatgctgcacagtacaattggg

SEQ ID NO: 2358 - DNA, 23 bp, Homo sapiens
ttagagttctcagtaaatgtagg

SEQ ID NO: 2359 - DNA, 23 bp, Homo sapiens
gcataattacattatttaagggg

SEQ ID NO: 2360 - DNA, 23 bp, Homo sapiens
gaggccattgaacaatttgaggg

SEQ ID NO: 2361 - DNA, 23 bp, Homo sapiens
gattcaaatggcacaacagaagg

SEQ ID NO: 2362 - DNA, 23 bp, Homo sapiens
tttcacatagtggttggtgatgg

SEQ ID NO: 2363 - DNA, 23 bp, Homo sapiens
acatgcatattttactgccatgg

SEQ ID NO: 2364 - DNA, 23 bp, Homo sapiens
ttctgattcccattctctgaggg

SEQ ID NO: 2365 - DNA, 23 bp, Homo sapiens
attctactattaagtaatgaagg

SEQ ID NO: 2366 - DNA, 23 bp, Homo sapiens
ttagtaaaacttatttgcgcggg

SEQ ID NO: 2367 - DNA, 23 bp, Homo sapiens
atttctgccattaatactgtagg

SEQ ID NO: 2368 - DNA, 23 bp, Homo sapiens
gacgtacataaactaccaatggg

SEQ ID NO: 2369 - DNA, 23 bp, Homo sapiens
ggtattacagaagcattgtaagg

SEQ ID NO: 2370 - DNA, 23 bp, Homo sapiens
ctgcttttagaaagtaagcccgg

SEQ ID NO: 2371 - DNA, 23 bp, Homo sapiens
tcttcttaagcagctagtatggg

SEQ ID NO: 2372 - DNA, 23 bp, Homo sapiens
taaaacggcatgaaaggaaaggg

SEQ ID NO: 2373 - DNA, 23 bp, Homo sapiens
gttttatgttgggtacaggttgg

SEQ ID NO: 2374 - DNA, 23 bp, Homo sapiens
attctgcctaaagttctgccagg

SEQ ID NO: 2375 - DNA, 23 bp, Homo sapiens
attggcagtgacagcggaggagg

SEQ ID NO: 2376 - DNA, 23 bp, Homo sapiens
tcttggttttctgaaggctaggg

SEQ ID NO: 2377 - DNA, 23 bp, Homo sapiens
gaaaatattacaatagaaggtgg

SEQ ID NO: 2378 - DNA, 23 bp, Homo sapiens
tattgtgaaggagcaaataccgg

SEQ ID NO: 2379 - DNA, 23 bp, Homo sapiens
cctctctcatggacagtcagagg

SEQ ID NO: 2380 - DNA, 23 bp, Homo sapiens
gagcaggactgtctagactttgg

SEQ ID NO: 2381 - DNA, 23 bp, Homo sapiens
gtccgaaaagagcaaagggctgg

SEQ ID NO: 2382 - DNA, 23 bp, Homo sapiens
gcataaattctgtgattaagtgg

SEQ ID NO: 2383 - DNA, 23 bp, Homo sapiens
agactgagactgtatctacttgg

SEQ ID NO: 2384 - DNA, 23 bp, Homo sapiens
tattctgcctccaggatttgggg

SEQ ID NO: 2385 - DNA, 23 bp, Homo sapiens
ggggcttttgttgtgaggaaggg

SEQ ID NO: 2386 - DNA, 23 bp, Homo sapiens
gttaggctcctgctgagagttgg

SEQ ID NO: 2387 - DNA, 23 bp, Homo sapiens
atctccaacaacggaaaagaggg

SEQ ID NO: 2388 - DNA, 23 bp, Homo sapiens
gattgataaatgagagtcctggg

SEQ ID NO: 2389 - DNA, 23 bp, Homo sapiens
aactacattgtgaagcctgatgg

SEQ ID NO: 2390 - DNA, 23 bp, Homo sapiens
cacataacctcccatttctaggg

SEQ ID NO: 2391 - DNA, 23 bp, Homo sapiens
ttagaacttcttgaacaagttgg

SEQ ID NO: 2392 - DNA, 23 bp, Homo sapiens
aaatacttgggaatttcagtagg

SEQ ID NO: 2393 - DNA, 23 bp, Homo sapiens
aagataatcagagtcacaaaagg

SEQ ID NO: 2394 - DNA, 23 bp, Homo sapiens
ttaatatgtaactcatggcttgg

SEQ ID NO: 2395 - DNA, 23 bp, Homo sapiens
taacacctgagtttttaaagtgg

SEQ ID NO: 2396 - DNA, 23 bp, Homo sapiens
tgagctgttacaaaagtggttgg

SEQ ID NO: 2397 - DNA, 23 bp, Homo sapiens
gtattccactttaaaaactcagg

SEQ ID NO: 2398 - DNA, 23 bp, Homo sapiens
gttcatcaaaatactcgtgttgg

SEQ ID NO: 2399 - DNA, 23 bp, Homo sapiens
taatgaaatgagaatgtagatgg

SEQ ID NO: 2400 - DNA, 23 bp, Homo sapiens
tctagaacagcatttccaaatgg

SEQ ID NO: 2401 - DNA, 23 bp, Homo sapiens
gcaagaccaagattatcatctgg

SEQ ID NO: 2402 - DNA, 23 bp, Homo sapiens
gcaggtacagaagtagatcatgg

SEQ ID NO: 2403 - DNA, 23 bp, Homo sapiens
gacagtggtgagttttagtaggg

SEQ ID NO: 2404 - DNA, 23 bp, Homo sapiens
ctcatatagtttaaaacacacgg

SEQ ID NO: 2405 - DNA, 23 bp, Homo sapiens
ttttattcagtagatatcactgg

SEQ ID NO: 2406 - DNA, 23 bp, Homo sapiens
aagcagcgcctctattgttaggg

SEQ ID NO: 2407 - DNA, 23 bp, Homo sapiens
attacagtatattctacagttgg

SEQ ID NO: 2408 - DNA, 23 bp, Homo sapiens
cttttccattgctaccaaagagg

SEQ ID NO: 2409 - DNA, 23 bp, Homo sapiens
gctgaatttacctatttggtagg

SEQ ID NO: 2410 - DNA, 23 bp, Homo sapiens
atattgcagcaacattatgaagg

SEQ ID NO: 2411 - DNA, 23 bp, Homo sapiens
ctataaactttaagggagcaggg

SEQ ID NO: 2412 - DNA, 23 bp, Homo sapiens
accttcggagaaaaacgaatagg

SEQ ID NO: 2413 - DNA, 23 bp, Homo sapiens
acatttcctcttgataaatgagg

SEQ ID NO: 2414 - DNA, 23 bp, Homo sapiens
aagatttccagtctgaaaagagg

SEQ ID NO: 2415 - DNA, 23 bp, Homo sapiens
gagaaaggatgttttagctgtgg

SEQ ID NO: 2416 - DNA, 23 bp, Homo sapiens
atcccatattcctattacccagg

SEQ ID NO: 2417 - DNA, 23 bp, Homo sapiens
ataatcttggtcttgcctgccgg

SEQ ID NO: 2418 - DNA, 23 bp, Homo sapiens
ggaaaaatacttggccagatggg

SEQ ID NO: 2419 - DNA, 23 bp, Homo sapiens
ataaatatgaaaaccatacatgg

SEQ ID NO: 2420 - DNA, 23 bp, Homo sapiens
gtctggttaaggaacactattgg

SEQ ID NO: 2421 - DNA, 23 bp, Homo sapiens
aatatcaaccgtcttctcactgg

SEQ ID NO: 2422 - DNA, 23 bp, Homo sapiens
tgctagaaatttgtgagcaaagg

SEQ ID NO: 2423 - DNA, 23 bp, Homo sapiens
attctgagcatgcccagtggtgg

SEQ ID NO: 2424 - DNA, 23 bp, Homo sapiens
cagattactgagaaagtgaatgg

SEQ ID NO: 2425 - DNA, 23 bp, Homo sapiens
tttaattatacagctaccctggg

SEQ ID NO: 2426 - DNA, 23 bp, Homo sapiens
ctaattatactcatgctacaagg

SEQ ID NO: 2427 - DNA, 23 bp, Homo sapiens
gatgccacctaatctccatcagg

SEQ ID NO: 2428 - DNA, 23 bp, Homo sapiens
ctctgacagcccattagagacgg

SEQ ID NO: 2429 - DNA, 23 bp, Homo sapiens
tatgaaaaaaaaataggataggg

SEQ ID NO: 2430 - DNA, 23 bp, Homo sapiens
cagtatgggaaatcaaaaaaggg

SEQ ID NO: 2431 - DNA, 23 bp, Homo sapiens
tcagtgagtttattaggctgagg

SEQ ID NO: 2432 - DNA, 23 bp, Homo sapiens
tagctaagtattaggaagggtgg

SEQ ID NO: 2433 - DNA, 23 bp, Homo sapiens
tgtttcacatttaagagggaagg

SEQ ID NO: 2434 - DNA, 23 bp, Homo sapiens
tgctgtatgcctgctggcatagg

SEQ ID NO: 2435 - DNA, 23 bp, Homo sapiens
ataatttagtgcaaaggtgtagg

SEQ ID NO: 2436 - DNA, 23 bp, Homo sapiens
aattgagtggtgcacgtcgaggg

SEQ ID NO: 2437 - DNA, 23 bp, Homo sapiens
actttaaagtcgttgtgaagtgg

SEQ ID NO: 2438 - DNA, 23 bp, Homo sapiens
aggagtttagtgatatcagttgg

SEQ ID NO: 2439 - DNA, 23 bp, Homo sapiens
ccatcattcccatggcctgtagg

SEQ ID NO: 2440 - DNA, 23 bp, Homo sapiens
tcggtccagcaacaataagctgg

SEQ ID NO: 2441 - DNA, 23 bp, Homo sapiens
gctcattacattctatattgtgg

SEQ ID NO: 2442 - DNA, 23 bp, Homo sapiens
gctaattaatggggacccatggg

SEQ ID NO: 2443 - DNA, 23 bp, Homo sapiens
tatttgatgccgtatgtgctcgg

SEQ ID NO: 2444 - DNA, 23 bp, Homo sapiens
ggtctattcattcaggctaaggg

SEQ ID NO: 2445 - DNA, 23 bp, Homo sapiens
tatatgtttagcctagaggcagg

SEQ ID NO: 2446 - DNA, 23 bp, Homo sapiens
gttttctcttccgctaaactggg

SEQ ID NO: 2447 - DNA, 23 bp, Homo sapiens
agtatgagcatgcaacggttagg

SEQ ID NO: 2448 - DNA, 23 bp, Homo sapiens
cccttaaagctgatcggcaaagg

SEQ ID NO: 2449 - DNA, 23 bp, Homo sapiens
cgttgcacacgtcctcaactagg

SEQ ID NO: 2450 - DNA, 23 bp, Homo sapiens
ccagggtggaaaataagcttagg

SEQ ID NO: 2451 - DNA, 23 bp, Homo sapiens
tcagttttatagtcttcagtggg

SEQ ID NO: 2452 - DNA, 23 bp, Homo sapiens
ttgagagtaaaatttgagcatgg

SEQ ID NO: 2453 - DNA, 23 bp, Homo sapiens
gccatttgccaagtgccaaatgg

SEQ ID NO: 2454 - DNA, 23 bp, Homo sapiens
atacagggtatataatttgaagg

SEQ ID NO: 2455 - DNA, 23 bp, Homo sapiens
cattgtgggattcctccctatgg

SEQ ID NO: 2456 - DNA, 23 bp, Homo sapiens
taaaaagtggagcttgcaaaggg

SEQ ID NO: 2457 - DNA, 23 bp, Homo sapiens
tttcttgttcatctattgtgagg

SEQ ID NO: 2458 - DNA, 23 bp, Homo sapiens
gcttttggctaagactgtcatgg

SEQ ID NO: 2459 - DNA, 23 bp, Homo sapiens
ttgtagccatgataaacaaatgg

SEQ ID NO: 2460 - DNA, 23 bp, Homo sapiens
tttacatttcattctttaggggg

SEQ ID NO: 2461 - DNA, 23 bp, Homo sapiens
gaaccattagtacttacaatggg

SEQ ID NO: 2462 - DNA, 23 bp, Homo sapiens
tttcaaaattggctattctgtgg

SEQ ID NO: 2463 - DNA, 23 bp, Homo sapiens
agatgtattgatttctccaaggg

SEQ ID NO: 2464 - DNA, 23 bp, Homo sapiens
gttttctctttaaggatctgtgg

SEQ ID NO: 2465 - DNA, 23 bp, Homo sapiens
cctctgagccctcaaggtggagg

SEQ ID NO: 2466 - DNA, 23 bp, Homo sapiens
ttatgcaaagctcctattgtggg

SEQ ID NO: 2467 - DNA, 23 bp, Homo sapiens
cctatgcaagtctagagaatggg

SEQ ID NO: 2468 - DNA, 23 bp, Homo sapiens
cattttatactaactatgggtgg

SEQ ID NO: 2469 - DNA, 23 bp, Homo sapiens
gcacccatgtcaatatgatcagg

SEQ ID NO: 2470 - DNA, 23 bp, Homo sapiens
actaatagatgttttacgtaggg

SEQ ID NO: 2471 - DNA, 23 bp, Homo sapiens
tgaaaacctggaaaaactaaagg

SEQ ID NO: 2472 - DNA, 23 bp, Homo sapiens
ggaaataacagacaaaagaaagg

SEQ ID NO: 2473 - DNA, 23 bp, Homo sapiens
agacagattttaggttaaagggg

SEQ ID NO: 2474 - DNA, 23 bp, Homo sapiens
tttcattaataatcaacagctgg

SEQ ID NO: 2475 - DNA, 23 bp, Homo sapiens
gaggccagacttgcagggcaggg

SEQ ID NO: 2476 - DNA, 23 bp, Homo sapiens
tactgcatggaactcgggtgggg

SEQ ID NO: 2477 - DNA, 23 bp, Homo sapiens
aattcagcctggtattactctgg

SEQ ID NO: 2478 - DNA, 23 bp, Homo sapiens
ctttcactgtggtaactggaagg

SEQ ID NO: 2479 - DNA, 23 bp, Homo sapiens
tatcaagatacttgaaagcaggg

SEQ ID NO: 2480 - DNA, 23 bp, Homo sapiens
ttgtgaactcctccaccttgagg

SEQ ID NO: 2481 - DNA, 23 bp, Homo sapiens
ataattagcttatgatcagatgg

SEQ ID NO: 2482 - DNA, 23 bp, Homo sapiens
ccacattgctggtaccgttgggg

SEQ ID NO: 2483 - DNA, 23 bp, Homo sapiens
acatgtatttatttagtgcccgg

SEQ ID NO: 2484 - DNA, 23 bp, Homo sapiens
cttggaattgaaatggaagctgg

SEQ ID NO: 2485 - DNA, 23 bp, Homo sapiens
acataatacaaacttcactttgg

SEQ ID NO: 2486 - DNA, 23 bp, Homo sapiens
aaggtcctcttcatagcagcagg

SEQ ID NO: 2487 - DNA, 23 bp, Homo sapiens
ttattgtctgctctctgtagtgg

SEQ ID NO: 2488 - DNA, 23 bp, Homo sapiens
ctttctgctaccagtagaagtgg

SEQ ID NO: 2489 - DNA, 23 bp, Homo sapiens
tttcagataattaggcagcctgg

SEQ ID NO: 2490 - DNA, 23 bp, Homo sapiens
agaggggaaatataccctaatgg

SEQ ID NO: 2491 - DNA, 23 bp, Homo sapiens
gatttcacaaattaaggagaagg

SEQ ID NO: 2492 - DNA, 23 bp, Homo sapiens
tgcatattctattactgcagtgg

SEQ ID NO: 2493 - DNA, 23 bp, Homo sapiens
gtagaaaactgtgtcattcgtgg

SEQ ID NO: 2494 - DNA, 23 bp, Homo sapiens
ttatgggtgtaaagtgtaagtgg

SEQ ID NO: 2495 - DNA, 23 bp, Homo sapiens
ctacgttgttaaaaatgggcagg

SEQ ID NO: 2496 - DNA, 23 bp, Homo sapiens
tagagggaagaaggatgcaatgg

SEQ ID NO: 2497 - DNA, 23 bp, Homo sapiens
attatcataattgaataagaagg

SEQ ID NO: 2498 - DNA, 23 bp, Homo sapiens
tattttagatttgcttgtaacgg

SEQ ID NO: 2499 - DNA, 23 bp, Homo sapiens
ttccaactctacacctccattgg

SEQ ID NO: 2500 - DNA, 23 bp, Homo sapiens
tttgactttttatatttgaaggg

SEQ ID NO: 2501 - DNA, 23 bp, Homo sapiens
ccagacagtaaagctgacttagg

SEQ ID NO: 2502 - DNA, 23 bp, Homo sapiens
agccctggtgatttttagggtgg

SEQ ID NO: 2503 - DNA, 23 bp, Homo sapiens
ctttgcttagctcttctggaggg

SEQ ID NO: 2504 - DNA, 23 bp, Homo sapiens
tttaatttcagggttcatgaagg

SEQ ID NO: 2505 - DNA, 23 bp, Homo sapiens
ttttagaataggttacaagtagg

SEQ ID NO: 2506 - DNA, 23 bp, Homo sapiens
cagtagatcatgttatgtaaagg

SEQ ID NO: 2507 - DNA, 23 bp, Homo sapiens
gagatattaccccagaaggctgg

SEQ ID NO: 2508 - DNA, 23 bp, Homo sapiens
ggtcaaaatcaagatttggcagg

SEQ ID NO: 2509 - DNA, 23 bp, Homo sapiens
atagagacttccaaaaagaatgg

SEQ ID NO: 2510 - DNA, 23 bp, Homo sapiens
ccgccaatggaggttaggtatgg

SEQ ID NO: 2511 - DNA, 23 bp, Homo sapiens
gccaaaagcagagtggaagaagg

SEQ ID NO: 2512 - DNA, 23 bp, Homo sapiens
tgtcgttcttgagggatgggtgg

SEQ ID NO: 2513 - DNA, 23 bp, Homo sapiens
agtgtcataccttccatcaaagg

SEQ ID NO: 2514 - DNA, 23 bp, Homo sapiens
gacaataacgatgctcctatggg

SEQ ID NO: 2515 - DNA, 23 bp, Homo sapiens
tgaggtaaccagccaggctacgg

SEQ ID NO: 2516 - DNA, 23 bp, Homo sapiens
tgatttccatgaggaaagctggg

SEQ ID NO: 2517 - DNA, 23 bp, Homo sapiens
tcaaaattagttccagaagaagg

SEQ ID NO: 2518 - DNA, 23 bp, Homo sapiens
atcttcttaaacattttcgttgg

SEQ ID NO: 2519 - DNA, 23 bp, Homo sapiens
gtaaaaaatgagagataggtggg

SEQ ID NO: 2520 - DNA, 23 bp, Homo sapiens
tttatattacttgagggtggtgg

SEQ ID NO: 2521 - DNA, 23 bp, Homo sapiens
gtattataactctttagcatagg

SEQ ID NO: 2522 - DNA, 23 bp, Homo sapiens
tcctagcaaaaactcccaaatgg

SEQ ID NO: 2523 - DNA, 23 bp, Homo sapiens
ttatgggcatgaaccagccttgg

SEQ ID NO: 2524 - DNA, 23 bp, Homo sapiens
atagagggagataaaggaagggg

SEQ ID NO: 2525 - DNA, 23 bp, Homo sapiens
gaagctttttcccttaaggatgg

SEQ ID NO: 2526 - DNA, 23 bp, Homo sapiens
gttaataaatgaagaactaaggg

SEQ ID NO: 2527 - DNA, 23 bp, Homo sapiens
ctcttcatttaaaaaagagaggg

SEQ ID NO: 2528 - DNA, 23 bp, Homo sapiens
tgtttttattatgctagccatgg

SEQ ID NO: 2529 - DNA, 23 bp, Homo sapiens
tttgctatgcaccggaccctggg

SEQ ID NO: 2530 - DNA, 23 bp, Homo sapiens
aataatacccacatcagtagagg

SEQ ID NO: 2531 - DNA, 23 bp, Homo sapiens
agaacacatcagaaaataagtgg

SEQ ID NO: 2532 - DNA, 23 bp, Homo sapiens
ctattgttaaacatcaatagagg

SEQ ID NO: 2533 - DNA, 23 bp, Homo sapiens
atttctgtaataaaaagtatggg

SEQ ID NO: 2534 - DNA, 23 bp, Homo sapiens
gccaagactgaatcatagaatgg

SEQ ID NO: 2535 - DNA, 23 bp, Homo sapiens
cacagaggctgagttttgactgg

SEQ ID NO: 2536 - DNA, 23 bp, Homo sapiens
tttatatgcccttaaaacgctgg

SEQ ID NO: 2537 - DNA, 23 bp, Homo sapiens
tgtgacccgactggttccctggg

SEQ ID NO: 2538 - DNA, 23 bp, Homo sapiens
agtgtcagatatggaggttgtgg

SEQ ID NO: 2539 - DNA, 23 bp, Homo sapiens
ttatcagcatcattcagctctgg

SEQ ID NO: 2540 - DNA, 23 bp, Homo sapiens
actgaggctatacttctgtatgg

SEQ ID NO: 2541 - DNA, 23 bp, Homo sapiens
agattataattgtttatagaggg

SEQ ID NO: 2542 - DNA, 23 bp, Homo sapiens
tggcacagtaagcctttggatgg

SEQ ID NO: 2543 - DNA, 23 bp, Homo sapiens
aggatgacaaaggtccttatggg

SEQ ID NO: 2544 - DNA, 23 bp, Homo sapiens
ctagtcctccctgagaatgtagg

SEQ ID NO: 2545 - DNA, 23 bp, Homo sapiens
aagagcctcctcgaggtgaatgg

SEQ ID NO: 2546 - DNA, 23 bp, Homo sapiens
gagtattacacacaaaatagtgg

SEQ ID NO: 2547 - DNA, 23 bp, Homo sapiens
atttacctcataaaacagttggg

SEQ ID NO: 2548 - DNA, 23 bp, Homo sapiens
ttgttacatctaatactggttgg

SEQ ID NO: 2549 - DNA, 23 bp, Homo sapiens
ctttaatcatgaaaacaaaaggg

SEQ ID NO: 2550 - DNA, 23 bp, Homo sapiens
gttaatgtcctactaaagctagg

SEQ ID NO: 2551 - DNA, 23 bp, Homo sapiens
ataccaccactgtactgtactgg

SEQ ID NO: 2552 - DNA, 23 bp, Homo sapiens
acgtaagccacaattttacaagg

SEQ ID NO: 2553 - DNA, 23 bp, Homo sapiens
ttcacctctctcaagaggcttgg

SEQ ID NO: 2554 - DNA, 23 bp, Homo sapiens
tgattgcatatctttcccatagg

SEQ ID NO: 2555 - DNA, 23 bp, Homo sapiens
gctcgattaggtttggtggttgg

SEQ ID NO: 2556 - DNA, 23 bp, Homo sapiens
ataacttgagtgcttttcaaagg

SEQ ID NO: 2557 - DNA, 23 bp, Homo sapiens
cttggataatctattagcattgg

SEQ ID NO: 2558 - DNA, 23 bp, Homo sapiens
tttgcagagtttgaagagctcgg

SEQ ID NO: 2559 - DNA, 23 bp, Homo sapiens
tctgtatatctgcctcctccagg

SEQ ID NO: 2560 - DNA, 23 bp, Homo sapiens
tgaataccagacaaaaatacagg

SEQ ID NO: 2561 - DNA, 23 bp, Homo sapiens
attgcataaccagttgtcactgg

SEQ ID NO: 2562 - DNA, 23 bp, Homo sapiens
gcagcacaatgtatcaccttagg

SEQ ID NO: 2563 - DNA, 23 bp, Homo sapiens
gtagtcatctttgtggtaggtgg

SEQ ID NO: 2564 - DNA, 23 bp, Homo sapiens
ggattgtctaagtcattggctgg

SEQ ID NO: 2565 - DNA, 23 bp, Homo sapiens
cagtgagagttggatagagaggg

SEQ ID NO: 2566 - DNA, 23 bp, Homo sapiens
ttcttagtagcataccactatgg

SEQ ID NO: 2567 - DNA, 23 bp, Homo sapiens
attacagccaatcacaatagtgg

SEQ ID NO: 2568 - DNA, 23 bp, Homo sapiens
atagagagcaatgagtatgtagg

SEQ ID NO: 2569 - DNA, 23 bp, Homo sapiens
ttaaggtgtttcttacctgatgg

SEQ ID NO: 2570 - DNA, 23 bp, Homo sapiens
tgcatgacttgaagacactaggg

SEQ ID NO: 2571 - DNA, 23 bp, Homo sapiens
gtgatcagtgaaatttacattgg

SEQ ID NO: 2572 - DNA, 23 bp, Homo sapiens
aatctgtcagtatctctctctgg

SEQ ID NO: 2573 - DNA, 23 bp, Homo sapiens
gattcggtaaatgccatttgagg

SEQ ID NO: 2574 - DNA, 23 bp, Homo sapiens
cctcttcatttaaaaaagagagg

SEQ ID NO: 2575 - DNA, 23 bp, Homo sapiens
ttggtcaatttgcaacccctggg

SEQ ID NO: 2576 - DNA, 23 bp, Homo sapiens
gggaaggcaacttaagctaaagg

SEQ ID NO: 2577 - DNA, 23 bp, Homo sapiens
atagactaaaactttacataggg

SEQ ID NO: 2578 - DNA, 23 bp, Homo sapiens
ctaaaacccagctttcctcatgg

SEQ ID NO: 2579 - DNA, 23 bp, Homo sapiens
cccagagcataagattgaagtgg

SEQ ID NO: 2580 - DNA, 23 bp, Homo sapiens
ttgtagctgtgagtaaagtaagg

SEQ ID NO: 2581 - DNA, 23 bp, Homo sapiens
tagtgcccaaccagagcaaaggg

SEQ ID NO: 2582 - DNA, 23 bp, Homo sapiens
agaaatggtggcaaagagctagg

SEQ ID NO: 2583 - DNA, 23 bp, Homo sapiens
attgttgtaaattttcctgaagg

SEQ ID NO: 2584 - DNA, 23 bp, Homo sapiens
cttgggagagccccgaaagatgg

SEQ ID NO: 2585 - DNA, 23 bp, Homo sapiens
taatctctagaggagccatctgg

SEQ ID NO: 2586 - DNA, 23 bp, Homo sapiens
tataaaggtggaaaaatacttgg

SEQ ID NO: 2587 - DNA, 23 bp, Homo sapiens
ttatagttagcaagatagcctgg

SEQ ID NO: 2588 - DNA, 23 bp, Homo sapiens
tgctctctattatacaaagaagg

SEQ ID NO: 2589 - DNA, 23 bp, Homo sapiens
ttttacatatattgattggaggg

SEQ ID NO: 2590 - DNA, 23 bp, Homo sapiens
attggcatagcattacactatgg

SEQ ID NO: 2591 - DNA, 23 bp, Homo sapiens
ccttagatagtattattatgtgg

SEQ ID NO: 2592 - DNA, 23 bp, Homo sapiens
gtaggcctcaagaccttgaatgg

SEQ ID NO: 2593 - DNA, 23 bp, Homo sapiens
gtagatgtcacagcgcaaacagg

SEQ ID NO: 2594 - DNA, 23 bp, Homo sapiens
ggagaaccatgcagtagggtggg

SEQ ID NO: 2595 - DNA, 23 bp, Homo sapiens
ctcccagctcaactttgggatgg

SEQ ID NO: 2596 - DNA, 23 bp, Homo sapiens
aggttcttttacttttagcaagg

SEQ ID NO: 2597 - DNA, 23 bp, Homo sapiens
gtgtcaatcaaaatagtcttcgg

SEQ ID NO: 2598 - DNA, 23 bp, Homo sapiens
agagaggtgaaggatatctcagg

SEQ ID NO: 2599 - DNA, 23 bp, Homo sapiens
tctctgctccaatacatacttgg

SEQ ID NO: 2600 - DNA, 23 bp, Homo sapiens
gttaaaaatctgctaagtaaagg

SEQ ID NO: 2601 - DNA, 23 bp, Homo sapiens
cttcagccccacaccaaacatgg

SEQ ID NO: 2602 - DNA, 23 bp, Homo sapiens
atcgtcaatgttgagcgtatcgg

SEQ ID NO: 2603 - DNA, 23 bp, Homo sapiens
tttaagtcagcacttagctcagg

SEQ ID NO: 2604 - DNA, 23 bp, Homo sapiens
tcttttcaagaatgattgctggg

SEQ ID NO: 2605 - DNA, 23 bp, Homo sapiens
agaccccactaaaagacaaaagg

SEQ ID NO: 2606 - DNA, 23 bp, Homo sapiens
aatgaggaggaaaaaatatgagg

SEQ ID NO: 2607 - DNA, 23 bp, Homo sapiens
tcattagtcatggagtcctaagg

SEQ ID NO: 2608 - DNA, 23 bp, Homo sapiens
gatgtatgccctcagagaatggg

SEQ ID NO: 2609 - DNA, 23 bp, Homo sapiens
gtcctcatgccaagttaaagtgg

SEQ ID NO: 2610 - DNA, 23 bp, Homo sapiens
atagagtgtgaagaggagatcgg

SEQ ID NO: 2611 - DNA, 23 bp, Homo sapiens
ttattcccttttctaaaatgagg

SEQ ID NO: 2612 - DNA, 23 bp, Homo sapiens
tcatattgagcttttggcagagg

SEQ ID NO: 2613 - DNA, 23 bp, Homo sapiens
agagccactgttctaaaagcagg

SEQ ID NO: 2614 - DNA, 23 bp, Homo sapiens
gattgaggcctgattcaacttgg

SEQ ID NO: 2615 - DNA, 23 bp, Homo sapiens
atcattataaggagatgaaaggg

SEQ ID NO: 2616 - DNA, 23 bp, Homo sapiens
gctgcgttagattttggggaggg

SEQ ID NO: 2617 - DNA, 23 bp, Homo sapiens
tatttctgtctgtttggagtggg

SEQ ID NO: 2618 - DNA, 23 bp, Homo sapiens
gctcaactgtgtgttaggcctgg

SEQ ID NO: 2619 - DNA, 23 bp, Homo sapiens
gagtccagttaaaggtagcttgg

SEQ ID NO: 2620 - DNA, 23 bp, Homo sapiens
gtaagatagtgtaagtaaagagg

SEQ ID NO: 2621 - DNA, 23 bp, Homo sapiens
ctaagcatcttttttcaagcggg

SEQ ID NO: 2622 - DNA, 23 bp, Homo sapiens
gcaaagtgtagtcatctttgtgg

SEQ ID NO: 2623 - DNA, 23 bp, Homo sapiens
gaacagatgttacgtggtagagg

SEQ ID NO: 2624 - DNA, 23 bp, Homo sapiens
aagctttagatgctgtacttagg

SEQ ID NO: 2625 - DNA, 23 bp, Homo sapiens
ttacattttatactaactatggg

SEQ ID NO: 2626 - DNA, 23 bp, Homo sapiens
tcctttgtctcatatactacggg

SEQ ID NO: 2627 - DNA, 23 bp, Homo sapiens
catccaagactgaaatggtaggg

SEQ ID NO: 2628 - DNA, 23 bp, Homo sapiens
tgtcttctatggcaaaccatggg

SEQ ID NO: 2629 - DNA, 23 bp, Homo sapiens
aaatgtgagtttctctcaaaggg

SEQ ID NO: 2630 - DNA, 23 bp, Homo sapiens
caggatagcttacttatacaggg

SEQ ID NO: 2631 - DNA, 23 bp, Homo sapiens
gtctaagtcattggctggaaggg

SEQ ID NO: 2632 - DNA, 23 bp, Homo sapiens
tttctttctcagcctccaaaagg

SEQ ID NO: 2633 - DNA, 23 bp, Homo sapiens
tttctttcccctacaatcagtgg

SEQ ID NO: 2634 - DNA, 23 bp, Homo sapiens
ctacttaagtactagagacttgg

SEQ ID NO: 2635 - DNA, 23 bp, Homo sapiens
tttgtaagtttatcaaactacgg

SEQ ID NO: 2636 - DNA, 23 bp, Homo sapiens
ctaaaaagtggagcttgcaaagg

SEQ ID NO: 2637 - DNA, 23 bp, Homo sapiens
accagtcttttaaacagtatcgg

SEQ ID NO: 2638 - DNA, 23 bp, Homo sapiens
actgagtaatggaatcttgaggg

SEQ ID NO: 2639 - DNA, 23 bp, Homo sapiens
ttttaagtcaacaacatacatgg

SEQ ID NO: 2640 - DNA, 23 bp, Homo sapiens
tttagtttgactcctcagctagg

SEQ ID NO: 2641 - DNA, 23 bp, Homo sapiens
ggttgaagtgggcatgtggaagg

SEQ ID NO: 2642 - DNA, 23 bp, Homo sapiens
ccgcagctaataatgacatatgg

SEQ ID NO: 2643 - DNA, 23 bp, Homo sapiens
tgatgtataggaagcaaagaagg

SEQ ID NO: 2644 - DNA, 23 bp, Homo sapiens
ctctgtaacttgttttaaggtgg

SEQ ID NO: 2645 - DNA, 23 bp, Homo sapiens
aagtattgccagagcttgaaggg

SEQ ID NO: 2646 - DNA, 23 bp, Homo sapiens
tgaaaaggagtaggaggctgagg

SEQ ID NO: 2647 - DNA, 23 bp, Homo sapiens
gagatatgtgcggctaacacagg

SEQ ID NO: 2648 - DNA, 23 bp, Homo sapiens
ggagccagaatagggagctaagg

SEQ ID NO: 2649 - DNA, 23 bp, Homo sapiens
agtgcctctttaatatgcttagg

SEQ ID NO: 2650 - DNA, 23 bp, Homo sapiens
tctagcctccactctaggattgg

SEQ ID NO: 2651 - DNA, 23 bp, Homo sapiens
gctgtggcacagtaagcctttgg

SEQ ID NO: 2652 - DNA, 23 bp, Homo sapiens
attggaatattttctggggaagg

SEQ ID NO: 2653 - DNA, 23 bp, Homo sapiens
aacttaatatttgcaaaactggg

SEQ ID NO: 2654 - DNA, 23 bp, Homo sapiens
cctcacacccaactcctcctagg

SEQ ID NO: 2655 - DNA, 23 bp, Homo sapiens
ttccatagttgattagcgtatgg

SEQ ID NO: 2656 - DNA, 23 bp, Homo sapiens
aggtgtccgaaaagagcaaaggg

SEQ ID NO: 2657 - DNA, 23 bp, Homo sapiens
tgtttgtattatagtccaaaagg

SEQ ID NO: 2658 - DNA, 23 bp, Homo sapiens
aatctgttacactagagatacgg

SEQ ID NO: 2659 - DNA, 23 bp, Homo sapiens
agttttgtccatatcatagcagg

SEQ ID NO: 2660 - DNA, 23 bp, Homo sapiens
gtgtatatccataaaaagaatgg

SEQ ID NO: 2661 - DNA, 23 bp, Homo sapiens
tatcaaaactaagtgcaaatggg

SEQ ID NO: 2662 - DNA, 23 bp, Homo sapiens
ctatggccccatcattcccatgg

SEQ ID NO: 2663 - DNA, 23 bp, Homo sapiens
tgatcggcaaaggaagaagctgg

SEQ ID NO: 2664 - DNA, 23 bp, Homo sapiens
ttaaatagagcaagtatgcttgg

SEQ ID NO: 2665 - DNA, 23 bp, Homo sapiens
tatgaaacccccataggctacgg

SEQ ID NO: 2666 - DNA, 23 bp, Homo sapiens
ttgcaaccaaacaaatccttggg

SEQ ID NO: 2667 - DNA, 23 bp, Homo sapiens
attcatgtattataaaaggctgg

SEQ ID NO: 2668 - DNA, 23 bp, Homo sapiens
aagagattaatggcaagaagagg

SEQ ID NO: 2669 - DNA, 23 bp, Homo sapiens
gtttgacaccaataacctatagg

SEQ ID NO: 2670 - DNA, 23 bp, Homo sapiens
agaaccatgcagtagggtggggg

SEQ ID NO: 2671 - DNA, 23 bp, Homo sapiens
tctgagcaacatattacaatggg

SEQ ID NO: 2672 - DNA, 23 bp, Homo sapiens
tttcagaataataaatagtaggg

SEQ ID NO: 2673 - DNA, 23 bp, Homo sapiens
atatatctttcaaaaatagctgg

SEQ ID NO: 2674 - DNA, 23 bp, Homo sapiens
ggtagcagaaagaatgaggttgg

SEQ ID NO: 2675 - DNA, 23 bp, Homo sapiens
gacatctgaggaggaacaaaggg

SEQ ID NO: 2676 - DNA, 23 bp, Homo sapiens
atatgcatataagatgtcattgg

SEQ ID NO: 2677 - DNA, 23 bp, Homo sapiens
gaggaatcagaaaactgaaaagg

SEQ ID NO: 2678 - DNA, 23 bp, Homo sapiens
gatgatgtatctttgattgaggg

SEQ ID NO: 2679 - DNA, 23 bp, Homo sapiens
gttatcataaatcctgtcctagg

SEQ ID NO: 2680 - DNA, 23 bp, Homo sapiens
ttagtttaaaagaactctgtagg

SEQ ID NO: 2681 - DNA, 23 bp, Homo sapiens
gcttgatctttcataaacactgg

SEQ ID NO: 2682 - DNA, 23 bp, Homo sapiens
tcctggctgttagactcactggg

SEQ ID NO: 2683 - DNA, 23 bp, Homo sapiens
cttcaagggcacagattacaggg

SEQ ID NO: 2684 - DNA, 23 bp, Homo sapiens
attgaagaaatgtattagagtgg

SEQ ID NO: 2685 - DNA, 23 bp, Homo sapiens
ttacgtattcctcttagaaaggg

SEQ ID NO: 2686 - DNA, 23 bp, Homo sapiens
ggaggaaagcagttttgcattgg

SEQ ID NO: 2687 - DNA, 23 bp, Homo sapiens
atatctaatgtttcatcacatgg

SEQ ID NO: 2688 - DNA, 23 bp, Homo sapiens
tgcacctgtttcttccactccgg

SEQ ID NO: 2689 - DNA, 23 bp, Homo sapiens
gatattttttatactatcaaggg

SEQ ID NO: 2690 - DNA, 23 bp, Homo sapiens
gagcctttaaaataccatgtagg

SEQ ID NO: 2691 - DNA, 23 bp, Homo sapiens
gtttccttttgttctctggaggg

SEQ ID NO: 2692 - DNA, 23 bp, Homo sapiens
ttagcattgttattccgtctggg

SEQ ID NO: 2693 - DNA, 23 bp, Homo sapiens
acttgctcgattaggtttggtgg

SEQ ID NO: 2694 - DNA, 23 bp, Homo sapiens
tattgatgcccctctacaaaagg

SEQ ID NO: 2695 - DNA, 23 bp, Homo sapiens
cccaattgagtgttttccaaagg

SEQ ID NO: 2696 - DNA, 23 bp, Homo sapiens
ttagttttaatggcccaaaaggg

SEQ ID NO: 2697 - DNA, 23 bp, Homo sapiens
agggctcctcaattgttgcatgg

SEQ ID NO: 2698 - DNA, 23 bp, Homo sapiens
tactgcagaacaattatggccgg

SEQ ID NO: 2699 - DNA, 23 bp, Homo sapiens
atttatttctgtactaagatcgg

SEQ ID NO: 2700 - DNA, 23 bp, Homo sapiens
agctatttaggcttggtcgccgg

SEQ ID NO: 2701 - DNA, 23 bp, Homo sapiens
tcagggattcacaagagagcagg

SEQ ID NO: 2702 - DNA, 23 bp, Homo sapiens
acagactagttcttaaagatagg

SEQ ID NO: 2703 - DNA, 23 bp, Homo sapiens
tttcttgtgtagtaataacttgg

SEQ ID NO: 2704 - DNA, 23 bp, Homo sapiens
aatagactaaaactttacatagg

SEQ ID NO: 2705 - DNA, 23 bp, Homo sapiens
atcctttgtctcatatactacgg

SEQ ID NO: 2706 - DNA, 23 bp, Homo sapiens
gcagttaacattcatatgaaagg

SEQ ID NO: 2707 - DNA, 23 bp, Homo sapiens
ctacaggccatgggaatgatggg

SEQ ID NO: 2708 - DNA, 23 bp, Homo sapiens
agagattaatggcaagaagaggg

SEQ ID NO: 2709 - DNA, 23 bp, Homo sapiens
aggagctgcagcttttcaaaggg

SEQ ID NO: 2710 - DNA, 23 bp, Homo sapiens
catcccctcaaattgttcaatgg

SEQ ID NO: 2711 - DNA, 23 bp, Homo sapiens
ggaagtcaacaaattgtcaatgg

SEQ ID NO: 2712 - DNA, 23 bp, Homo sapiens
tatcaatcatcgctgagaaaagg

SEQ ID NO: 2713 - DNA, 23 bp, Homo sapiens
gcaaccggagtggaagaaacagg

SEQ ID NO: 2714 - DNA, 23 bp, Homo sapiens
aaaaaattattccagttacatgg

SEQ ID NO: 2715 - DNA, 23 bp, Homo sapiens
acttatttgcgcgggtaatgagg

SEQ ID NO: 2716 - DNA, 23 bp, Homo sapiens
agaatcattttccaagcagatgg

SEQ ID NO: 2717 - DNA, 23 bp, Homo sapiens
ttatacttatattcaagcacagg

SEQ ID NO: 2718 - DNA, 23 bp, Homo sapiens
tatctcatacaccttttgctggg

SEQ ID NO: 2719 - DNA, 23 bp, Homo sapiens
tctaatttacatcctatacttgg

SEQ ID NO: 2720 - DNA, 23 bp, Homo sapiens
tctgggttttgcatgacagctgg

SEQ ID NO: 2721 - DNA, 23 bp, Homo sapiens
gccgcaggtatgtcattcatagg

SEQ ID NO: 2722 - DNA, 23 bp, Homo sapiens
gatctgtgagagatgggaatagg

SEQ ID NO: 2723 - DNA, 23 bp, Homo sapiens
ttaaaaaaaaagaagcctctcgg

SEQ ID NO: 2724 - DNA, 23 bp, Homo sapiens
gcctttgaccatattctgaaagg

SEQ ID NO: 2725 - DNA, 23 bp, Homo sapiens
gattgcatatctttcccataggg

SEQ ID NO: 2726 - DNA, 23 bp, Homo sapiens
tatctaaatgtgaagttggcggg

SEQ ID NO: 2727 - DNA, 23 bp, Homo sapiens
cctggattatttccatctatggg

SEQ ID NO: 2728 - DNA, 23 bp, Homo sapiens
ttctgagctgccttagcaaaggg

SEQ ID NO: 2729 - DNA, 23 bp, Homo sapiens
agtttacattatttgctcatcgg

SEQ ID NO: 2730 - DNA, 23 bp, Homo sapiens
acagcataattttctacatacgg

SEQ ID NO: 2731 - DNA, 23 bp, Homo sapiens
tgtggcccaaaagaaaagatagg

SEQ ID NO: 2732 - DNA, 23 bp, Homo sapiens
gctgcattaatcataatgcttgg

SEQ ID NO: 2733 - DNA, 23 bp, Homo sapiens
taattctgagggcgttttggagg

SEQ ID NO: 2734 - DNA, 23 bp, Homo sapiens
ttttgtgtttagaaatgctaggg

SEQ ID NO: 2735 - DNA, 23 bp, Homo sapiens
ttatttttattcagtatatgtgg

SEQ ID NO: 2736 - DNA, 23 bp, Homo sapiens
acacctttttaaatacaccttgg

SEQ ID NO: 2737 - DNA, 23 bp, Homo sapiens
tttaagtgactgtctattggagg

SEQ ID NO: 2738 - DNA, 23 bp, Homo sapiens
gtgttgactcactcagtgttggg

SEQ ID NO: 2739 - DNA, 23 bp, Homo sapiens
cttaccttacttgcaaaggatgg

SEQ ID NO: 2740 - DNA, 23 bp, Homo sapiens
acaaaaagttagttttctgtagg

SEQ ID NO: 2741 - DNA, 23 bp, Homo sapiens
aaagacatactaggataaagtgg

SEQ ID NO: 2742 - DNA, 23 bp, Homo sapiens
ttaacatcagaaagaacgttggg

SEQ ID NO: 2743 - DNA, 23 bp, Homo sapiens
ttaatgataaacattagataagg

SEQ ID NO: 2744 - DNA, 23 bp, Homo sapiens
gatgcatatgagattattggagg

SEQ ID NO: 2745 - DNA, 23 bp, Homo sapiens
caatctagaggaaatggcttcgg

SEQ ID NO: 2746 - DNA, 23 bp, Homo sapiens
ggaaatattttcatgaaacctgg

SEQ ID NO: 2747 - DNA, 23 bp, Homo sapiens
atttaaggggaaaaaggtgttgg

SEQ ID NO: 2748 - DNA, 23 bp, Homo sapiens
gtgtcatcctaagaaacaattgg

SEQ ID NO: 2749 - DNA, 23 bp, Homo sapiens
tgctgcctgctgtatctcactgg

SEQ ID NO: 2750 - DNA, 23 bp, Homo sapiens
tcacttgaagatttttagtaggg

SEQ ID NO: 2751 - DNA, 23 bp, Homo sapiens
gcaagatactgcatggaactcgg

SEQ ID NO: 2752 - DNA, 23 bp, Homo sapiens
ttcttcaaggatgtgttgtaggg

SEQ ID NO: 2753 - DNA, 23 bp, Homo sapiens
tgacaagtgatcctcaaaacagg

SEQ ID NO: 2754 - DNA, 23 bp, Homo sapiens
ataacaaattaagatctaaaggg

SEQ ID NO: 2755 - DNA, 23 bp, Homo sapiens
ggaattcacaaacacagataggg

SEQ ID NO: 2756 - DNA, 23 bp, Homo sapiens
catatgttctgtacatcagccgg

SEQ ID NO: 2757 - DNA, 23 bp, Homo sapiens
aagctggtaaacctcattgtagg

SEQ ID NO: 2758 - DNA, 23 bp, Homo sapiens
cattgtggatgtagagtcattgg

SEQ ID NO: 2759 - DNA, 23 bp, Homo sapiens
gggtgaccacagtttaaagaagg

SEQ ID NO: 2760 - DNA, 23 bp, Homo sapiens
atatgcatacctcttaaaatggg

SEQ ID NO: 2761 - DNA, 23 bp, Homo sapiens
cataggatcacaattcatctagg

SEQ ID NO: 2762 - DNA, 23 bp, Homo sapiens
atccctcacgttcttcaggttgg

SEQ ID NO: 2763 - DNA, 23 bp, Homo sapiens
atttaattaatcttcagtgatgg

SEQ ID NO: 2764 - DNA, 23 bp, Homo sapiens
ttaaaaaaatacaatggtaaggg

SEQ ID NO: 2765 - DNA, 23 bp, Homo sapiens
ctacagggttattttgtggttgg

SEQ ID NO: 2766 - DNA, 23 bp, Homo sapiens
tatgtctaatgggtgctcaatgg

SEQ ID NO: 2767 - DNA, 23 bp, Homo sapiens
tggatgtagtagttgagtagtgg

SEQ ID NO: 2768 - DNA, 23 bp, Homo sapiens
ttatgctcatctctaggtatggg

SEQ ID NO: 2769 - DNA, 23 bp, Homo sapiens
aataatatgggacaccgtaatgg

SEQ ID NO: 2770 - DNA, 23 bp, Homo sapiens
tgtaaaatgatgaaagcaaaggg

SEQ ID NO: 2771 - DNA, 23 bp, Homo sapiens
gctcttttggtgtgatcaagggg

SEQ ID NO: 2772 - DNA, 23 bp, Homo sapiens
gctgcttgaaatgactaaacagg

SEQ ID NO: 2773 - DNA, 23 bp, Homo sapiens
gcaaagcttgaaatagcaaaagg

SEQ ID NO: 2774 - DNA, 23 bp, Homo sapiens
gtaaaatatgacaaaactctagg

SEQ ID NO: 2775 - DNA, 23 bp, Homo sapiens
gatacagtctaggggtggacagg

SEQ ID NO: 2776 - DNA, 23 bp, Homo sapiens
cagccctctaccctaaataaggg

SEQ ID NO: 2777 - DNA, 23 bp, Homo sapiens
gtaaactattgtagctctaaggg

SEQ ID NO: 2778 - DNA, 23 bp, Homo sapiens
gaaacttgatagccttttggagg

SEQ ID NO: 2779 - DNA, 23 bp, Homo sapiens
attaagctctacattggctaagg

SEQ ID NO: 2780 - DNA, 23 bp, Homo sapiens
aatctgaaggacaagaagcttgg

SEQ ID NO: 2781 - DNA, 23 bp, Homo sapiens
tctgaaacactgaagatcaatgg

SEQ ID NO: 2782 - DNA, 23 bp, Homo sapiens
ttttggagcattataaaggaagg

SEQ ID NO: 2783 - DNA, 23 bp, Homo sapiens
atacatagcaagacatgtattgg

SEQ ID NO: 2784 - DNA, 23 bp, Homo sapiens
gtgtatgcaactaagatgattgg

SEQ ID NO: 2785 - DNA, 23 bp, Homo sapiens
gggatggctggggggaatgtggg

SEQ ID NO: 2786 - DNA, 23 bp, Homo sapiens
gtagtgtttgcagcatgaaaagg

SEQ ID NO: 2787 - DNA, 23 bp, Homo sapiens
tagaaaggatatttctagagagg

SEQ ID NO: 2788 - DNA, 23 bp, Homo sapiens
aatttttgagaatggaagctggg

SEQ ID NO: 2789 - DNA, 23 bp, Homo sapiens
attactttcgatctcaagactgg

SEQ ID NO: 2790 - DNA, 23 bp, Homo sapiens
tggctaaaacatctatagaaagg

SEQ ID NO: 2791 - DNA, 23 bp, Homo sapiens
cattctgcatatatttaacatgg

SEQ ID NO: 2792 - DNA, 23 bp, Homo sapiens
gctccatttaaaactatggcagg

SEQ ID NO: 2793 - DNA, 23 bp, Homo sapiens
tgatgccgaaaagaacatatagg

SEQ ID NO: 2794 - DNA, 23 bp, Homo sapiens
gagaatattgagaaataaggtgg

SEQ ID NO: 2795 - DNA, 23 bp, Homo sapiens
gtattaccagccaagtgccttgg

SEQ ID NO: 2796 - DNA, 23 bp, Homo sapiens
ttgtgttctaaattcaaagaagg

SEQ ID NO: 2797 - DNA, 23 bp, Homo sapiens
ggaggccccaatactgttgaagg

SEQ ID NO: 2798 - DNA, 23 bp, Homo sapiens
gtatagtgtgttacagaacttgg

SEQ ID NO: 2799 - DNA, 23 bp, Homo sapiens
attgtgaaacaatctcaaatagg

SEQ ID NO: 2800 - DNA, 23 bp, Homo sapiens
atagcagtcaatgcttatatggg

SEQ ID NO: 2801 - DNA, 23 bp, Homo sapiens
ctaatttgttgcccatgtcaggg

SEQ ID NO: 2802 - DNA, 23 bp, Homo sapiens
cttgctatgtatggccaaacggg

SEQ ID NO: 2803 - DNA, 23 bp, Homo sapiens
atttgattcgaatttaaatgagg

SEQ ID NO: 2804 - DNA, 23 bp, Homo sapiens
aggaaaattgcagaatgcagagg

SEQ ID NO: 2805 - DNA, 23 bp, Homo sapiens
gctccatgcatttttaagtacgg

SEQ ID NO: 2806 - DNA, 23 bp, Homo sapiens
ggctttaaagatctaaactaagg

SEQ ID NO: 2807 - DNA, 23 bp, Homo sapiens
gattatcaactaaggctgaatgg

SEQ ID NO: 2808 - DNA, 23 bp, Homo sapiens
gtaaaactttacttgtatgttgg

SEQ ID NO: 2809 - DNA, 23 bp, Homo sapiens
aagagagtatccatctcctaagg

SEQ ID NO: 2810 - DNA, 23 bp, Homo sapiens
ggatatgggtgactgccaacagg

SEQ ID NO: 2811 - DNA, 23 bp, Homo sapiens
ttgtttgcttgatttatacatgg

SEQ ID NO: 2812 - DNA, 23 bp, Homo sapiens
aaataactctttaaaggaaaggg

SEQ ID NO: 2813 - DNA, 23 bp, Homo sapiens
ataattgagttagaaggtagagg

SEQ ID NO: 2814 - DNA, 23 bp, Homo sapiens
tgccagcgtgatttcttcaaagg

SEQ ID NO: 2815 - DNA, 23 bp, Homo sapiens
gagtacaattggctcctagaagg

SEQ ID NO: 2816 - DNA, 23 bp, Homo sapiens
ctagctccctgccacaaagatgg

SEQ ID NO: 2817 - DNA, 23 bp, Homo sapiens
ttagttcttctgccatacatagg

SEQ ID NO: 2818 - DNA, 23 bp, Homo sapiens
gttggaaaaacagtgccatctgg

SEQ ID NO: 2819 - DNA, 23 bp, Homo sapiens
ttccaaatttaaattcccattgg

SEQ ID NO: 2820 - DNA, 23 bp, Homo sapiens
aactccttgtctcttttggaagg

SEQ ID NO: 2821 - DNA, 23 bp, Homo sapiens
atccttctatgagcaaaagttgg

SEQ ID NO: 2822 - DNA, 23 bp, Homo sapiens
attttactgccagtttcagcagg

SEQ ID NO: 2823 - DNA, 23 bp, Homo sapiens
tattcaacagtcacagaaagagg

SEQ ID NO: 2824 - DNA, 23 bp, Homo sapiens
atagaattcaagcaatttggagg

SEQ ID NO: 2825 - DNA, 23 bp, Homo sapiens
aaactagcatattttcccattgg

SEQ ID NO: 2826 - DNA, 23 bp, Homo sapiens
aggtggctgttaatgataagagg

SEQ ID NO: 2827 - DNA, 23 bp, Homo sapiens
gttggaatagcaatagaaaaggg

SEQ ID NO: 2828 - DNA, 23 bp, Homo sapiens
aattttattttctaacctgttgg

SEQ ID NO: 2829 - DNA, 23 bp, Homo sapiens
tgtaatttaggtgaaattgttgg

SEQ ID NO: 2830 - DNA, 23 bp, Homo sapiens
ctgtttgttttctaagcaaaggg

SEQ ID NO: 2831 - DNA, 23 bp, Homo sapiens
gcctttgttgttgccttcagggg

SEQ ID NO: 2832 - DNA, 23 bp, Homo sapiens
atatttttattacaagtatgtgg

SEQ ID NO: 2833 - DNA, 23 bp, Homo sapiens
ggaaaatcaaaccaagcaaaagg

SEQ ID NO: 2834 - DNA, 23 bp, Homo sapiens
agctgatgagattttagaagagg

SEQ ID NO: 2835 - DNA, 23 bp, Homo sapiens
gcacagaaatgtagatttcgcgg

SEQ ID NO: 2836 - DNA, 23 bp, Homo sapiens
ttctgataaccccttcgaatggg

SEQ ID NO: 2837 - DNA, 23 bp, Homo sapiens
cttgatgaattcagaatctaggg

SEQ ID NO: 2838 - DNA, 23 bp, Homo sapiens
ccttgaaattgctaatacaatgg

SEQ ID NO: 2839 - DNA, 23 bp, Homo sapiens
tcttatctatatgatgggatggg

SEQ ID NO: 2840 - DNA, 23 bp, Homo sapiens
agagactaaccagtgacaactgg

SEQ ID NO: 2841 - DNA, 23 bp, Homo sapiens
ttctttttgtaataggagatggg

SEQ ID NO: 2842 - DNA, 23 bp, Homo sapiens
gacatattcctgactccagcagg

SEQ ID NO: 2843 - DNA, 23 bp, Homo sapiens
atataattcttattatttcaggg

SEQ ID NO: 2844 - DNA, 23 bp, Homo sapiens
ccacagtgaaagaaacaaacagg

SEQ ID NO: 2845 - DNA, 23 bp, Homo sapiens
ccattaaccttatctttgaaagg

SEQ ID NO: 2846 - DNA, 23 bp, Homo sapiens
agtttccttttgttctctggagg

SEQ ID NO: 2847 - DNA, 23 bp, Homo sapiens
gtaagttgttgctaaattgtggg

SEQ ID NO: 2848 - DNA, 23 bp, Homo sapiens
ttatggggaatttaaaagtgtgg

SEQ ID NO: 2849 - DNA, 23 bp, Homo sapiens
aaccatgatatctccaacaacgg

SEQ ID NO: 2850 - DNA, 23 bp, Homo sapiens
ttttgagcaaacgtttatagagg

SEQ ID NO: 2851 - DNA, 23 bp, Homo sapiens
acagtaattggcactgaaagagg

SEQ ID NO: 2852 - DNA, 23 bp, Homo sapiens
taaatcttagactaaaatgttgg

SEQ ID NO: 2853 - DNA, 23 bp, Homo sapiens
attccagataagaagacccttgg

SEQ ID NO: 2854 - DNA, 23 bp, Homo sapiens
cttgctttactcttaagcactgg

SEQ ID NO: 2855 - DNA, 23 bp, Homo sapiens
tatattatgcccaaggcacttgg

SEQ ID NO: 2856 - DNA, 23 bp, Homo sapiens
ttactttctttaatctacaaagg

SEQ ID NO: 2857 - DNA, 23 bp, Homo sapiens
aggtctccagtgtaatttagagg

SEQ ID NO: 2858 - DNA, 23 bp, Homo sapiens
ttcaaagagtaccatataagcgg

SEQ ID NO: 2859 - DNA, 23 bp, Homo sapiens
acatagacaaagaaataagtagg

SEQ ID NO: 2860 - DNA, 23 bp, Homo sapiens
gcagcgtgaaaaaatcctacagg

SEQ ID NO: 2861 - DNA, 23 bp, Homo sapiens
cagtacttaaaagtattaaacgg

SEQ ID NO: 2862 - DNA, 23 bp, Homo sapiens
atattgcaattagtatctatagg

SEQ ID NO: 2863 - DNA, 23 bp, Homo sapiens
gtttccaaaccggaacactttgg

SEQ ID NO: 2864 - DNA, 23 bp, Homo sapiens
ttcttagcagaaaaactcatagg

SEQ ID NO: 2865 - DNA, 23 bp, Homo sapiens
tcaatactattaacaaccccagg

SEQ ID NO: 2866 - DNA, 23 bp, Homo sapiens
tcctcactatgaattagattagg

SEQ ID NO: 2867 - DNA, 23 bp, Homo sapiens
atattctgcactccatcgtcagg

SEQ ID NO: 2868 - DNA, 23 bp, Homo sapiens
ccaaggtataatctatttgaggg

SEQ ID NO: 2869 - DNA, 23 bp, Homo sapiens
agagaagtggaaggtttagaggg

SEQ ID NO: 2870 - DNA, 23 bp, Homo sapiens
cttcaagcccccagtgaagtagg

SEQ ID NO: 2871 - DNA, 23 bp, Homo sapiens
cttgtttcacaacatttatgtgg

SEQ ID NO: 2872 - DNA, 23 bp, Homo sapiens
caaaaaatcgactcttggaatgg

SEQ ID NO: 2873 - DNA, 23 bp, Homo sapiens
tctgacaagttggcttaaaaggg

SEQ ID NO: 2874 - DNA, 23 bp, Homo sapiens
ctttccctcacagatccctcagg

SEQ ID NO: 2875 - DNA, 23 bp, Homo sapiens
gcatccaaatacccctcataggg

SEQ ID NO: 2876 - DNA, 23 bp, Homo sapiens
atgtatctgtttatacaagttgg

SEQ ID NO: 2877 - DNA, 23 bp, Homo sapiens
ttttccatctctcattcagatgg

SEQ ID NO: 2878 - DNA, 23 bp, Homo sapiens
cttttgttgtgcacgtatatggg

SEQ ID NO: 2879 - DNA, 23 bp, Homo sapiens
gggcatacatccgtgttactagg

SEQ ID NO: 2880 - DNA, 23 bp, Homo sapiens
ataagggcaaattaaaatgcagg

SEQ ID NO: 2881 - DNA, 23 bp, Homo sapiens
ctgggcagagaagtcatgcttgg

SEQ ID NO: 2882 - DNA, 23 bp, Homo sapiens
acagtgttacatttaatgctagg

SEQ ID NO: 2883 - DNA, 23 bp, Homo sapiens
agcttatgatcagatggttaggg

SEQ ID NO: 2884 - DNA, 23 bp, Homo sapiens
tatctactctgcatgaagctagg

SEQ ID NO: 2885 - DNA, 23 bp, Homo sapiens
aatagactattttgaagcaaagg

SEQ ID NO: 2886 - DNA, 23 bp, Homo sapiens
agtacattacagaaaaaggctgg

SEQ ID NO: 2887 - DNA, 23 bp, Homo sapiens
taggcactgtgcaagttagttgg

SEQ ID NO: 2888 - DNA, 23 bp, Homo sapiens
gtgtgtgtgtgtattgtagcagg

SEQ ID NO: 2889 - DNA, 23 bp, Homo sapiens
attgtaaagtcaataaataacgg

SEQ ID NO: 2890 - DNA, 23 bp, Homo sapiens
ttatcaagatacttgaaagcagg

SEQ ID NO: 2891 - DNA, 23 bp, Homo sapiens
aattctgctcttgagaaaagagg

SEQ ID NO: 2892 - DNA, 23 bp, Homo sapiens
tttgtcacaaccctagaaatggg

SEQ ID NO: 2893 - DNA, 23 bp, Homo sapiens
ggtgtaacaaaaagtgataatgg

SEQ ID NO: 2894 - DNA, 23 bp, Homo sapiens
ccatcatttgcagggctggaggg

SEQ ID NO: 2895 - DNA, 23 bp, Homo sapiens
atggagattgtaatatttggtgg

SEQ ID NO: 2896 - DNA, 23 bp, Homo sapiens
ttgtaaagtcaataaataacggg

SEQ ID NO: 2897 - DNA, 23 bp, Homo sapiens
attcccttatttagggtagaggg

SEQ ID NO: 2898 - DNA, 23 bp, Homo sapiens
ttacttgcctttgtaggtagagg

SEQ ID NO: 2899 - DNA, 23 bp, Homo sapiens
agtctctaatagcaaacaaaagg

SEQ ID NO: 2900 - DNA, 23 bp, Homo sapiens
aggtcagtcactggaccctcagg

SEQ ID NO: 2901 - DNA, 23 bp, Homo sapiens
ctgactttattttgtccctaggg

SEQ ID NO: 2902 - DNA, 23 bp, Homo sapiens
ggcttagtcctcaataagtaagg

SEQ ID NO: 2903 - DNA, 23 bp, Homo sapiens
gctgtgtctatggggttataggg

SEQ ID NO: 2904 - DNA, 23 bp, Homo sapiens
tgtgtgggaaaccctgagaatgg

SEQ ID NO: 2905 - DNA, 23 bp, Homo sapiens
ggtttccaacaagagccctccgg

SEQ ID NO: 2906 - DNA, 23 bp, Homo sapiens
tctactcttgggcttattcgtgg

SEQ ID NO: 2907 - DNA, 23 bp, Homo sapiens
agaaggtgtgaaagagaagtggg

SEQ ID NO: 2908 - DNA, 23 bp, Homo sapiens
gtaaggattttgaaacttggagg

SEQ ID NO: 2909 - DNA, 23 bp, Homo sapiens
aattcatgattttagttggaggg

SEQ ID NO: 2910 - DNA, 23 bp, Homo sapiens
cagttcccattagtgaggaatgg

SEQ ID NO: 2911 - DNA, 23 bp, Homo sapiens
ttatggattgtttgactggaggg

SEQ ID NO: 2912 - DNA, 23 bp, Homo sapiens
cctgtctcctaaattttgcatgg

SEQ ID NO: 2913 - DNA, 23 bp, Homo sapiens
acaaaagcttacattcactttgg

SEQ ID NO: 2914 - DNA, 23 bp, Homo sapiens
acaagtctactggaagactttgg

SEQ ID NO: 2915 - DNA, 23 bp, Homo sapiens
tcatcatccgggattcttgtagg

SEQ ID NO: 2916 - DNA, 23 bp, Homo sapiens
ttttttttgtgtgtgttgggggg

SEQ ID NO: 2917 - DNA, 23 bp, Homo sapiens
cagccagctttccagaaggctgg

SEQ ID NO: 2918 - DNA, 23 bp, Homo sapiens
atgttcgtaactgagagttaggg

SEQ ID NO: 2919 - DNA, 23 bp, Homo sapiens
tgtacataaaaaactggcctagg

SEQ ID NO: 2920 - DNA, 23 bp, Homo sapiens
tgtcagggtcctggtgataatgg

SEQ ID NO: 2921 - DNA, 23 bp, Homo sapiens
agaaacagacaagattactttgg

SEQ ID NO: 2922 - DNA, 23 bp, Homo sapiens
tataatttttcctagaatgaggg

SEQ ID NO: 2923 - DNA, 23 bp, Homo sapiens
tctctttagttaagtccaatggg

SEQ ID NO: 2924 - DNA, 23 bp, Homo sapiens
tacgttatttagctcccttaggg

SEQ ID NO: 2925 - DNA, 23 bp, Homo sapiens
tttttacctgagttgagaaaagg

SEQ ID NO: 2926 - DNA, 23 bp, Homo sapiens
attcataagaaatttttcaatgg

SEQ ID NO: 2927 - DNA, 23 bp, Homo sapiens
gagctaagtgctgacttaaaggg

SEQ ID NO: 2928 - DNA, 23 bp, Homo sapiens
ttttcattcctaatgccctaagg

SEQ ID NO: 2929 - DNA, 23 bp, Homo sapiens
cacttttagtattaagtagaggg

SEQ ID NO: 2930 - DNA, 23 bp, Homo sapiens
tattgtagccagatctttggtgg

SEQ ID NO: 2931 - DNA, 23 bp, Homo sapiens
ttaaaacgtgtatttaaaagtgg

SEQ ID NO: 2932 - DNA, 23 bp, Homo sapiens
tgccttatactacctgactctgg

SEQ ID NO: 2933 - DNA, 23 bp, Homo sapiens
cctaagcatcttttttcaagcgg

SEQ ID NO: 2934 - DNA, 23 bp, Homo sapiens
cagaatcttcaacatacaaatgg

SEQ ID NO: 2935 - DNA, 23 bp, Homo sapiens
atataatccatcttttaagaagg

SEQ ID NO: 2936 - DNA, 23 bp, Homo sapiens
agatgacaagtgaatctcatagg

SEQ ID NO: 2937 - DNA, 23 bp, Homo sapiens
gatttccaaccactttaacttgg

SEQ ID NO: 2938 - DNA, 23 bp, Homo sapiens
tagcagtgctactaagtgaatgg

SEQ ID NO: 2939 - DNA, 23 bp, Homo sapiens
tcatatggcaaactaaagaaagg

SEQ ID NO: 2940 - DNA, 23 bp, Homo sapiens
gtgggaagtacaatagcaactgg

SEQ ID NO: 2941 - DNA, 23 bp, Homo sapiens
gtatacaattggattctgtcagg

SEQ ID NO: 2942 - DNA, 23 bp, Homo sapiens
tctttcacttaaaatagctctgg

SEQ ID NO: 2943 - DNA, 23 bp, Homo sapiens
catatggcaaactaaagaaaggg

SEQ ID NO: 2944 - DNA, 23 bp, Homo sapiens
ttaaaatatcttaagcagtcagg

SEQ ID NO: 2945 - DNA, 23 bp, Homo sapiens
tgatatcctcagccaagtatagg

SEQ ID NO: 2946 - DNA, 23 bp, Homo sapiens
tgctcccctcaaaagtcccttgg

SEQ ID NO: 2947 - DNA, 23 bp, Homo sapiens
gtatccatccaagactgaaatgg

SEQ ID NO: 2948 - DNA, 23 bp, Homo sapiens
agtttttccctttcactcatcgg

SEQ ID NO: 2949 - DNA, 23 bp, Homo sapiens
tgaagaataaacaggcctttggg

SEQ ID NO: 2950 - DNA, 23 bp, Homo sapiens
gggaagatcaaagaaaaatcagg

SEQ ID NO: 2951 - DNA, 23 bp, Homo sapiens
tcgggcataaagcatttccttgg

SEQ ID NO: 2952 - DNA, 23 bp, Homo sapiens
tcttacttaaaggactgattcgg

SEQ ID NO: 2953 - DNA, 23 bp, Homo sapiens
tcagcactagcagcacttgttgg

SEQ ID NO: 2954 - DNA, 23 bp, Homo sapiens
attactttgtcagtacttcaggg

SEQ ID NO: 2955 - DNA, 23 bp, Homo sapiens
ttaaagccacatccactgatagg

SEQ ID NO: 2956 - DNA, 23 bp, Homo sapiens
tgctaattaatggggacccatgg

SEQ ID NO: 2957 - DNA, 23 bp, Homo sapiens
gcacactaaaaggcctatagagg

SEQ ID NO: 2958 - DNA, 23 bp, Homo sapiens
tgagagagaagacttgcaaaagg

SEQ ID NO: 2959 - DNA, 23 bp, Homo sapiens
attatttcctcttttcagactgg

SEQ ID NO: 2960 - DNA, 23 bp, Homo sapiens
tgccagttatgggcttaagatgg

SEQ ID NO: 2961 - DNA, 23 bp, Homo sapiens
acgtacaatgtcgttcttgaggg

SEQ ID NO: 2962 - DNA, 23 bp, Homo sapiens
ttatgttgcaatttgaagacagg

SEQ ID NO: 2963 - DNA, 23 bp, Homo sapiens
ttacagtcatagtaggttgtggg

SEQ ID NO: 2964 - DNA, 23 bp, Homo sapiens
catgggacccgcctgttcagagg

SEQ ID NO: 2965 - DNA, 23 bp, Homo sapiens
ataaatttacaaggggcctatgg

SEQ ID NO: 2966 - DNA, 23 bp, Homo sapiens
cactccatcgtcaggtaagaagg

SEQ ID NO: 2967 - DNA, 23 bp, Homo sapiens
aatcaggtcatggggctttgcgg

SEQ ID NO: 2968 - DNA, 23 bp, Homo sapiens
atacttctttgcaaaccaaaagg

SEQ ID NO: 2969 - DNA, 23 bp, Homo sapiens
gcctcctccaggaagatttgagg

SEQ ID NO: 2970 - DNA, 23 bp, Homo sapiens
ctccagctgcatttatatagagg

SEQ ID NO: 2971 - DNA, 23 bp, Homo sapiens
atttgaggatgatattcaacagg

SEQ ID NO: 2972 - DNA, 23 bp, Homo sapiens
actagcatctgacagcctattgg

SEQ ID NO: 2973 - DNA, 23 bp, Homo sapiens
gttattcattcagcaaaagaagg

SEQ ID NO: 2974 - DNA, 23 bp, Homo sapiens
tatttggtcccactgatgaatgg

SEQ ID NO: 2975 - DNA, 23 bp, Homo sapiens
tctagtctaaacaagtctactgg

SEQ ID NO: 2976 - DNA, 23 bp, Homo sapiens
gcaacacatacaataaatgtagg

SEQ ID NO: 2977 - DNA, 23 bp, Homo sapiens
gatcattcatccctaggaacagg

SEQ ID NO: 2978 - DNA, 23 bp, Homo sapiens
cattttgatgaagcgatgtaggg

SEQ ID NO: 2979 - DNA, 23 bp, Homo sapiens
tacttcactgggggcttgaaggg

SEQ ID NO: 2980 - DNA, 23 bp, Homo sapiens
gtatgactctgctttattggagg

SEQ ID NO: 2981 - DNA, 23 bp, Homo sapiens
aaacacacaggacaagaagatgg

SEQ ID NO: 2982 - DNA, 23 bp, Homo sapiens
tatttaccaattactgacatagg

SEQ ID NO: 2983 - DNA, 23 bp, Homo sapiens
ctacgcatgcatagaaaactagg

SEQ ID NO: 2984 - DNA, 23 bp, Homo sapiens
tgcaagaaagatacagtctaggg

SEQ ID NO: 2985 - DNA, 23 bp, Homo sapiens
attagggtatatttcccctctgg

SEQ ID NO: 2986 - DNA, 23 bp, Homo sapiens
ctgatcatttatccttttagcgg

SEQ ID NO: 2987 - DNA, 23 bp, Homo sapiens
tattctctcatctcataaagagg

SEQ ID NO: 2988 - DNA, 23 bp, Homo sapiens
tcacttgtatttatacagaatgg

SEQ ID NO: 2989 - DNA, 23 bp, Homo sapiens
ccaggaacatgctatatagctgg

SEQ ID NO: 2990 - DNA, 23 bp, Homo sapiens
ctttattgtagcatgacttaggg

SEQ ID NO: 2991 - DNA, 23 bp, Homo sapiens
tcagttcttacttcgtagaatgg

SEQ ID NO: 2992 - DNA, 23 bp, Homo sapiens
atgagtttggtaagaaaaaacgg

SEQ ID NO: 2993 - DNA, 23 bp, Homo sapiens
cctgctccataacaggcaatagg

SEQ ID NO: 2994 - DNA, 23 bp, Homo sapiens
aaatgaacagactttggtactgg

SEQ ID NO: 2995 - DNA, 23 bp, Homo sapiens
tgaataatattggttaatatggg

SEQ ID NO: 2996 - DNA, 23 bp, Homo sapiens
agctctggattgtttaaggatgg

SEQ ID NO: 2997 - DNA, 23 bp, Homo sapiens
tcacttaattaattaaagcctgg

SEQ ID NO: 2998 - DNA, 23 bp, Homo sapiens
ataattgctgacatttaaaacgg

SEQ ID NO: 2999 - DNA, 23 bp, Homo sapiens
agtccagttaaaggtagcttggg

SEQ ID NO: 3000 - DNA, 23 bp, Homo sapiens
ttcttaagcacaattctgatagg

SEQ ID NO: 3001 - DNA, 23 bp, Homo sapiens
acatttaaaatgaaaacaatggg

SEQ ID NO: 3002 - DNA, 23 bp, Homo sapiens
tttacttgaaaactgttccctgg

SEQ ID NO: 3003 - DNA, 23 bp, Homo sapiens
aataagtgataaataacaacagg

SEQ ID NO: 3004 - DNA, 23 bp, Homo sapiens
ttcaatggcaaaatgaggcttgg

SEQ ID NO: 3005 - DNA, 23 bp, Homo sapiens
ctttggcaataggattcaaatgg

SEQ ID NO: 3006 - DNA, 23 bp, Homo sapiens
accataatgttgttgaagatggg

SEQ ID NO: 3007 - DNA, 23 bp, Homo sapiens
gggcacagctaccaggaaaaggg

SEQ ID NO: 3008 - DNA, 23 bp, Homo sapiens
gtgtggctctggttttcgccagg

SEQ ID NO: 3009 - DNA, 23 bp, Homo sapiens
tttctttttcttactagtagagg

SEQ ID NO: 3010 - DNA, 23 bp, Homo sapiens
taacagtattaagatcataaggg

SEQ ID NO: 3011 - DNA, 23 bp, Homo sapiens
cattttttaatactcaaaatggg

SEQ ID NO: 3012 - DNA, 23 bp, Homo sapiens
cttctcatatccctatgttcagg

SEQ ID NO: 3013 - DNA, 23 bp, Homo sapiens
ctggagcatttagagtaaaaggg

SEQ ID NO: 3014 - DNA, 23 bp, Homo sapiens
tgagaacacctcactattcacgg

SEQ ID NO: 3015 - DNA, 23 bp, Homo sapiens
aacctcatcatatataatgatgg

SEQ ID NO: 3016 - DNA, 23 bp, Homo sapiens
tcagctagaaagcagctaatggg

SEQ ID NO: 3017 - DNA, 23 bp, Homo sapiens
tttctgtctgtgctaatacttgg

SEQ ID NO: 3018 - DNA, 23 bp, Homo sapiens
actagccagaaggagcagtatgg

SEQ ID NO: 3019 - DNA, 23 bp, Homo sapiens
tttttctgaatgttagtccatgg

SEQ ID NO: 3020 - DNA, 23 bp, Homo sapiens
gcaaacgccacttctttctcagg

SEQ ID NO: 3021 - DNA, 23 bp, Homo sapiens
tctgaacaggcgggtcccatggg

SEQ ID NO: 3022 - DNA, 23 bp, Homo sapiens
ttggttagtttatcaacccctgg

SEQ ID NO: 3023 - DNA, 23 bp, Homo sapiens
tgagcatgagtcttacagtatgg

SEQ ID NO: 3024 - DNA, 23 bp, Homo sapiens
agtagcagaacttttgttggtgg

SEQ ID NO: 3025 - DNA, 23 bp, Homo sapiens
ataactataccaaagtgttccgg

SEQ ID NO: 3026 - DNA, 23 bp, Homo sapiens
agactagctcttattacccttgg

SEQ ID NO: 3027 - DNA, 23 bp, Homo sapiens
gtaaattattttcatacaagtgg

SEQ ID NO: 3028 - DNA, 23 bp, Homo sapiens
aatcccccaagagtgctctatgg

SEQ ID NO: 3029 - DNA, 23 bp, Homo sapiens
ctgtgcctatcctaataagcagg

SEQ ID NO: 3030 - DNA, 23 bp, Homo sapiens
tagaaggtgtgaaagagaagtgg

SEQ ID NO: 3031 - DNA, 23 bp, Homo sapiens
cttaccacagatatattcctagg

SEQ ID NO: 3032 - DNA, 23 bp, Homo sapiens
gcctagatcctgactgtcacagg

SEQ ID NO: 3033 - DNA, 23 bp, Homo sapiens
tctgacttttagatgaaaagagg

SEQ ID NO: 3034 - DNA, 23 bp, Homo sapiens
tgatatttgaagtcaagaaccgg

SEQ ID NO: 3035 - DNA, 23 bp, Homo sapiens
taagtatcttaaaaccctaaagg

SEQ ID NO: 3036 - DNA, 23 bp, Homo sapiens
tttcagacaagaaaagctttggg

SEQ ID NO: 3037 - DNA, 23 bp, Homo sapiens
gcaaatctatctagaaaaaaggg

SEQ ID NO: 3038 - DNA, 23 bp, Homo sapiens
aattttaaagggaattaagatgg

SEQ ID NO: 3039 - DNA, 23 bp, Homo sapiens
gcatgtgtgataaataaattggg

SEQ ID NO: 3040 - DNA, 23 bp, Homo sapiens
actctttgcagctcttcagctgg

SEQ ID NO: 3041 - DNA, 23 bp, Homo sapiens
tttgtactatcagctatagatgg

SEQ ID NO: 3042 - DNA, 23 bp, Homo sapiens
gagtctgtcactttaacaaatgg

SEQ ID NO: 3043 - DNA, 23 bp, Homo sapiens
tgatgatgctgaggactagatgg

SEQ ID NO: 3044 - DNA, 23 bp, Homo sapiens
ggaggccattgaacaatttgagg

SEQ ID NO: 3045 - DNA, 23 bp, Homo sapiens
gtaggcagctgtatggaaacagg

SEQ ID NO: 3046 - DNA, 23 bp, Homo sapiens
ttaattgtaatccttagccttgg

SEQ ID NO: 3047 - DNA, 23 bp, Homo sapiens
aagaatccttcctttcataaggg

SEQ ID NO: 3048 - DNA, 23 bp, Homo sapiens
atgttgtcctttttcttgcatgg

SEQ ID NO: 3049 - DNA, 23 bp, Homo sapiens
tcttgcctgaaattggtaagagg

SEQ ID NO: 3050 - DNA, 23 bp, Homo sapiens
tgaactatctttatcaaatgtgg

SEQ ID NO: 3051 - DNA, 23 bp, Homo sapiens
ctaaaatctcatcagctcctagg

SEQ ID NO: 3052 - DNA, 23 bp, Homo sapiens
gagattttaacatattagaatgg

SEQ ID NO: 3053 - DNA, 23 bp, Homo sapiens
gctaccctcttctctcttcgtgg

SEQ ID NO: 3054 - DNA, 23 bp, Homo sapiens
cttgccctctgatgtccagctgg

SEQ ID NO: 3055 - DNA, 23 bp, Homo sapiens
ttaacgatgactgaattgatagg

SEQ ID NO: 3056 - DNA, 23 bp, Homo sapiens
gtaactcctggtacacttgtagg

SEQ ID NO: 3057 - DNA, 23 bp, Homo sapiens
gatgctggcttccatcctactgg

SEQ ID NO: 3058 - DNA, 23 bp, Homo sapiens
ttaaatgtctgaaaatggattgg

SEQ ID NO: 3059 - DNA, 23 bp, Homo sapiens
aagaagctatagaaatagattgg

SEQ ID NO: 3060 - DNA, 23 bp, Homo sapiens
tatctcttatatgcatcagttgg

SEQ ID NO: 3061 - DNA, 23 bp, Homo sapiens
atccaattgtcatttctaagagg

SEQ ID NO: 3062 - DNA, 23 bp, Homo sapiens
taccagattgaggatattagagg

SEQ ID NO: 3063 - DNA, 23 bp, Homo sapiens
ggtgtatgagataaaacataagg

SEQ ID NO: 3064 - DNA, 23 bp, Homo sapiens
aaaggtgatgtaggtgtgaaggg

SEQ ID NO: 3065 - DNA, 23 bp, Homo sapiens
gcccataactggcaaccaacagg

SEQ ID NO: 3066 - DNA, 23 bp, Homo sapiens
ggatgtatgccctcagagaatgg

SEQ ID NO: 3067 - DNA, 23 bp, Homo sapiens
ataaggacgtgtctgcttgtggg

SEQ ID NO: 3068 - DNA, 23 bp, Homo sapiens
tccttatgagatgcatgccctgg

SEQ ID NO: 3069 - DNA, 23 bp, Homo sapiens
gctgagcacaattaccattacgg

SEQ ID NO: 3070 - DNA, 23 bp, Homo sapiens
ttttgttctctggagggaggtgg

SEQ ID NO: 3071 - DNA, 23 bp, Homo sapiens
cgattaggtttggtggttggagg

SEQ ID NO: 3072 - DNA, 23 bp, Homo sapiens
gtcagccagaaaatatatatagg

SEQ ID NO: 3073 - DNA, 23 bp, Homo sapiens
ggtcagataattgagttagaagg

SEQ ID NO: 3074 - DNA, 23 bp, Homo sapiens
tttttttccttgttgagtaaagg

SEQ ID NO: 3075 - DNA, 23 bp, Homo sapiens
cagtctatgcagagattcaatgg

SEQ ID NO: 3076 - DNA, 23 bp, Homo sapiens
cactctcttggaaatgagaaagg

SEQ ID NO: 3077 - DNA, 23 bp, Homo sapiens
tggcctagggaataaataatggg

SEQ ID NO: 3078 - DNA, 23 bp, Homo sapiens
tctgccgctgatggtttgttcgg

SEQ ID NO: 3079 - DNA, 23 bp, Homo sapiens
ctcttcctcttttctcacatggg

SEQ ID NO: 3080 - DNA, 23 bp, Homo sapiens
tttcaaatgatccttttgcttgg

SEQ ID NO: 3081 - DNA, 23 bp, Homo sapiens
tttctcaatgaactgagtaatgg

SEQ ID NO: 3082 - DNA, 23 bp, Homo sapiens
cctcaaatagattataccttggg

SEQ ID NO: 3083 - DNA, 23 bp, Homo sapiens
atatgagagtctctgaataaggg

SEQ ID NO: 3084 - DNA, 23 bp, Homo sapiens
taatactttggaaattgaaaggg

SEQ ID NO: 3085 - DNA, 23 bp, Homo sapiens
acctccctccagagaacaaaagg

SEQ ID NO: 3086 - DNA, 23 bp, Homo sapiens
agtgtggctgggagtctacctgg

SEQ ID NO: 3087 - DNA, 23 bp, Homo sapiens
tgtttccactgggaatatatagg

SEQ ID NO: 3088 - DNA, 23 bp, Homo sapiens
gtatgcatatgtacataaatcgg

SEQ ID NO: 3089 - DNA, 23 bp, Homo sapiens
gattgacacccgtagcctatggg

SEQ ID NO: 3090 - DNA, 23 bp, Homo sapiens
ccagtaggtgggtcactcattgg

SEQ ID NO: 3091 - DNA, 23 bp, Homo sapiens
acaagtgcagattttagccttgg

SEQ ID NO: 3092 - DNA, 23 bp, Homo sapiens
ttttttcatatatcatcaatggg

SEQ ID NO: 3093 - DNA, 23 bp, Homo sapiens
gattatcatgtgcgtttccatgg

SEQ ID NO: 3094 - DNA, 23 bp, Homo sapiens
aagctgaaaggtaaacaaatcgg

SEQ ID NO: 3095 - DNA, 23 bp, Homo sapiens
atagaactttctatgtatagagg

SEQ ID NO: 3096 - DNA, 23 bp, Homo sapiens
ccagagaaaatgaagctaaaggg

SEQ ID NO: 3097 - DNA, 23 bp, Homo sapiens
tatcacaaaaagagaaataaggg

SEQ ID NO: 3098 - DNA, 23 bp, Homo sapiens
catagtatgcagattttaagtgg

SEQ ID NO: 3099 - DNA, 23 bp, Homo sapiens
aattccctggttttgctccccgg

SEQ ID NO: 3100 - DNA, 23 bp, Homo sapiens
gtttattattgataatctaaagg

SEQ ID NO: 3101 - DNA, 23 bp, Homo sapiens
agatgaacgtttcttttcctagg

SEQ ID NO: 3102 - DNA, 23 bp, Homo sapiens
tgtaaccacttacacactaatgg

SEQ ID NO: 3103 - DNA, 23 bp, Homo sapiens
gtacagtgttctttatcgtatgg

SEQ ID NO: 3104 - DNA, 23 bp, Homo sapiens
gttcccagattcctgttcctagg

SEQ ID NO: 3105 - DNA, 23 bp, Homo sapiens
gctgtgaaggttcaataaatagg

SEQ ID NO: 3106 - DNA, 23 bp, Homo sapiens
acgttcccatataatagaaatgg

SEQ ID NO: 3107 - DNA, 23 bp, Homo sapiens
ccactgggcatgctcagaatagg

SEQ ID NO: 3108 - DNA, 23 bp, Homo sapiens
tctgccatacataggtcttaggg

SEQ ID NO: 3109 - DNA, 23 bp, Homo sapiens
agtgtctcctttgatagtgttgg

SEQ ID NO: 3110 - DNA, 23 bp, Homo sapiens
aatagttaagatgttgtatgagg

SEQ ID NO: 3111 - DNA, 23 bp, Homo sapiens
attgattgataagttatgccagg

SEQ ID NO: 3112 - DNA, 23 bp, Homo sapiens
ggaggttgacaagggaaaaaggg

SEQ ID NO: 3113 - DNA, 23 bp, Homo sapiens
tttaactcaccctttctaagagg

SEQ ID NO: 3114 - DNA, 23 bp, Homo sapiens
ctacagcaagatgttcccttagg

SEQ ID NO: 3115 - DNA, 23 bp, Homo sapiens
gcatgtcatatacctggttatgg

SEQ ID NO: 3116 - DNA, 23 bp, Homo sapiens
cctgcttgagctattgttggagg

SEQ ID NO: 3117 - DNA, 23 bp, Homo sapiens
ttaatattgtcaaaaaagcttgg

SEQ ID NO: 3118 - DNA, 23 bp, Homo sapiens
ctactttcatatttttaggttgg

SEQ ID NO: 3119 - DNA, 23 bp, Homo sapiens
aagacctccctctcttagctggg

SEQ ID NO: 3120 - DNA, 23 bp, Homo sapiens
gggaaatctgagagtacaattgg

SEQ ID NO: 3121 - DNA, 23 bp, Homo sapiens
agttaacctttccatcctcttgg

SEQ ID NO: 3122 - DNA, 23 bp, Homo sapiens
acgatatgtgcaaaaattcaggg

SEQ ID NO: 3123 - DNA, 23 bp, Homo sapiens
tctagttaaggtttttcagcagg

SEQ ID NO: 3124 - DNA, 23 bp, Homo sapiens
tcttgctatgtatggccaaacgg

SEQ ID NO: 3125 - DNA, 23 bp, Homo sapiens
aggtagctcacagaataatcagg

SEQ ID NO: 3126 - DNA, 23 bp, Homo sapiens
ttacattgtaatgcttgtaatgg

SEQ ID NO: 3127 - DNA, 23 bp, Homo sapiens
ttttctatcacagatttacatgg

SEQ ID NO: 3128 - DNA, 23 bp, Homo sapiens
gaaggcctagtgaggaaagatgg

SEQ ID NO: 3129 - DNA, 23 bp, Homo sapiens
tgacagaaacgctctttcaatgg

SEQ ID NO: 3130 - DNA, 23 bp, Homo sapiens
ataaaatgaaataaaagcttcgg

SEQ ID NO: 3131 - DNA, 23 bp, Homo sapiens
ctatcatttgcaaagcactatgg

SEQ ID NO: 3132 - DNA, 23 bp, Homo sapiens
gaatacacattagaaacaattgg

SEQ ID NO: 3133 - DNA, 23 bp, Homo sapiens
tgtaaatcctctcattaagatgg

SEQ ID NO: 3134 - DNA, 23 bp, Homo sapiens
tcttgaatggtcacttaaaacgg

SEQ ID NO: 3135 - DNA, 23 bp, Homo sapiens
gtaatactttggaaattgaaagg

SEQ ID NO: 3136 - DNA, 23 bp, Homo sapiens
tagattatagaagtttacattgg

SEQ ID NO: 3137 - DNA, 23 bp, Homo sapiens
cactagctacactattttggagg

SEQ ID NO: 3138 - DNA, 23 bp, Homo sapiens
agagtcagtcttttagaaaaggg

SEQ ID NO: 3139 - DNA, 23 bp, Homo sapiens
agacagctgattatataagttgg

SEQ ID NO: 3140 - DNA, 23 bp, Homo sapiens
attagtcacgtacatacatatgg

SEQ ID NO: 3141 - DNA, 23 bp, Homo sapiens
agtgcacaagtcaacccgtttgg

SEQ ID NO: 3142 - DNA, 23 bp, Homo sapiens
gagtgaaagtgaggcattgaggg

SEQ ID NO: 3143 - DNA, 23 bp, Homo sapiens
ttttttttcctgagagtaagtgg

SEQ ID NO: 3144 - DNA, 23 bp, Homo sapiens
gtggctttggtaaggtaagttgg

SEQ ID NO: 3145 - DNA, 23 bp, Homo sapiens
gatatttgaggcaaatccttcgg

SEQ ID NO: 3146 - DNA, 23 bp, Homo sapiens
cagccatgttaataattagtagg

SEQ ID NO: 3147 - DNA, 23 bp, Homo sapiens
caataatgttcctcttttagcgg

SEQ ID NO: 3148 - DNA, 23 bp, Homo sapiens
cctactaaacgaattataaaggg

SEQ ID NO: 3149 - DNA, 23 bp, Homo sapiens
aaatcatcagtaatacatatagg

SEQ ID NO: 3150 - DNA, 23 bp, Homo sapiens
gtaaacattttatagacaaaagg

SEQ ID NO: 3151 - DNA, 23 bp, Homo sapiens
atcattgtggccagctcccaggg

SEQ ID NO: 3152 - DNA, 23 bp, Homo sapiens
tactttctttaatctacaaaggg

SEQ ID NO: 3153 - DNA, 23 bp, Homo sapiens
tgataaggttaacaatccttggg

SEQ ID NO: 3154 - DNA, 23 bp, Homo sapiens
tttgaattactatttttcactgg

SEQ ID NO: 3155 - DNA, 23 bp, Homo sapiens
gtttaggcttgcttcatttgcgg

SEQ ID NO: 3156 - DNA, 23 bp, Homo sapiens
ttcattacatggataagcattgg

SEQ ID NO: 3157 - DNA, 23 bp, Homo sapiens
tgtttatttggaattccccttgg

SEQ ID NO: 3158 - DNA, 23 bp, Homo sapiens
gcttctcttattcagactgttgg

SEQ ID NO: 3159 - DNA, 23 bp, Homo sapiens
aggtttgtactactacatatagg

SEQ ID NO: 3160 - DNA, 23 bp, Homo sapiens
aagcctatcaaaagtgaaatggg

SEQ ID NO: 3161 - DNA, 23 bp, Homo sapiens
aggaattccaagcatataatggg

SEQ ID NO: 3162 - DNA, 23 bp, Homo sapiens
attagaaccaaatttggaatggg

SEQ ID NO: 3163 - DNA, 23 bp, Homo sapiens
gatagcttaaagctcagaaatgg

SEQ ID NO: 3164 - DNA, 23 bp, Homo sapiens
ctaaatgcatgtacaaactaagg

SEQ ID NO: 3165 - DNA, 23 bp, Homo sapiens
agtatagtgctttataaaaaggg

SEQ ID NO: 3166 - DNA, 23 bp, Homo sapiens
gtaagacaaaactcattaaaggg

SEQ ID NO: 3167 - DNA, 23 bp, Homo sapiens
gatggagcttgccttccatcagg

SEQ ID NO: 3168 - DNA, 23 bp, Homo sapiens
tttacagtcatagtaggttgtgg

SEQ ID NO: 3169 - DNA, 23 bp, Homo sapiens
gttataacacaggtaactatagg

SEQ ID NO: 3170 - DNA, 23 bp, Homo sapiens
ccatagttacttttaaaagaagg

SEQ ID NO: 3171 - DNA, 23 bp, Homo sapiens
ttattgtatctatataagattgg

SEQ ID NO: 3172 - DNA, 23 bp, Homo sapiens
ataaagaatgaactatctatagg

SEQ ID NO: 3173 - DNA, 23 bp, Homo sapiens
gtggcattcatgttagccttagg

SEQ ID NO: 3174 - DNA, 23 bp, Homo sapiens
ccaaataagtagtaaacaaaggg

SEQ ID NO: 3175 - DNA, 23 bp, Homo sapiens
tgtagtagcagaacttttgttgg

SEQ ID NO: 3176 - DNA, 23 bp, Homo sapiens
tattttataagttatttgaatgg

SEQ ID NO: 3177 - DNA, 23 bp, Homo sapiens
ggataaaaacagaatgttgatgg

SEQ ID NO: 3178 - DNA, 23 bp, Homo sapiens
gatttgaaggaggctagaatagg

SEQ ID NO: 3179 - DNA, 23 bp, Homo sapiens
aaagttatggtacaattcctagg

SEQ ID NO: 3180 - DNA, 23 bp, Homo sapiens
tttctaggcaatctgctagcagg

SEQ ID NO: 3181 - DNA, 23 bp, Homo sapiens
gtctgtgtttgaattaagaatgg

SEQ ID NO: 3182 - DNA, 23 bp, Homo sapiens
ggactttttccctatcagtcagg

SEQ ID NO: 3183 - DNA, 23 bp, Homo sapiens
gatttcgttgacccttaactagg

SEQ ID NO: 3184 - DNA, 23 bp, Homo sapiens
ttaatgaatttttatccccctgg

SEQ ID NO: 3185 - DNA, 23 bp, Homo sapiens
gcggaaagccggggtaaccgtgg

SEQ ID NO: 3186 - DNA, 23 bp, Homo sapiens
ccatagtgcctgacaaaacctgg

SEQ ID NO: 3187 - DNA, 23 bp, Homo sapiens
ttataagcattcttctgcctggg

SEQ ID NO: 3188 - DNA, 23 bp, Homo sapiens
ttaaaacagaaataaagtttcgg

SEQ ID NO: 3189 - DNA, 23 bp, Homo sapiens
tatatctgacctttattgacagg

SEQ ID NO: 3190 - DNA, 23 bp, Homo sapiens
tgtagctatcacttacttcgtgg

SEQ ID NO: 3191 - DNA, 23 bp, Homo sapiens
ctgtctgtttggagtgggcaggg

SEQ ID NO: 3192 - DNA, 23 bp, Homo sapiens
tgtgaactcctccaccttgaggg

SEQ ID NO: 3193 - DNA, 23 bp, Homo sapiens
tcagtgatattcagtatgattgg

SEQ ID NO: 3194 - DNA, 23 bp, Homo sapiens
ggagatacagagttttatgttgg

SEQ ID NO: 3195 - DNA, 23 bp, Homo sapiens
attcatgtgcaacctaaatacgg

SEQ ID NO: 3196 - DNA, 23 bp, Homo sapiens
gataattacttcactctacatgg

SEQ ID NO: 3197 - DNA, 23 bp, Homo sapiens
atactgtttttagttgcaaatgg

SEQ ID NO: 3198 - DNA, 23 bp, Homo sapiens
tagcaaagaggagtaggtattgg

SEQ ID NO: 3199 - DNA, 23 bp, Homo sapiens
ttagctctcaaaagcacattggg

SEQ ID NO: 3200 - DNA, 23 bp, Homo sapiens
tattttccccccatgggtagtgg

SEQ ID NO: 3201 - DNA, 23 bp, Homo sapiens
atagactgtaggaagtataatgg

SEQ ID NO: 3202 - DNA, 23 bp, Homo sapiens
acacagggcctggattataaggg

SEQ ID NO: 3203 - DNA, 23 bp, Homo sapiens
cactcttcctgtgacccgactgg

SEQ ID NO: 3204 - DNA, 23 bp, Homo sapiens
agcctattgtagctgcctaatgg

SEQ ID NO: 3205 - DNA, 23 bp, Homo sapiens
tttaggacatatttagaaagtgg

SEQ ID NO: 3206 - DNA, 23 bp, Homo sapiens
ctccttctcgcggggctcgaggg

SEQ ID NO: 3207 - DNA, 23 bp, Homo sapiens
gtacacaccccgtctctaatggg

SEQ ID NO: 3208 - DNA, 23 bp, Homo sapiens
aaatatatcttgacagcaaatgg

SEQ ID NO: 3209 - DNA, 23 bp, Homo sapiens
tttacactatgtttccaaaccgg

SEQ ID NO: 3210 - DNA, 23 bp, Homo sapiens
gtgcactcatttatgcaaactgg

SEQ ID NO: 3211 - DNA, 23 bp, Homo sapiens
ggcagcggtggctaatacttagg

SEQ ID NO: 3212 - DNA, 23 bp, Homo sapiens
tttttgtaggagcttgggctagg

SEQ ID NO: 3213 - DNA, 23 bp, Homo sapiens
gtcagtgctgaaaacatgtttgg

SEQ ID NO: 3214 - DNA, 23 bp, Homo sapiens
ataataggttattggaaggtagg

SEQ ID NO: 3215 - DNA, 23 bp, Homo sapiens
gcagtggtgattccaatcattgg

SEQ ID NO: 3216 - DNA, 23 bp, Homo sapiens
gtgcacactcaagctgttgatgg

SEQ ID NO: 3217 - DNA, 23 bp, Homo sapiens
gcttcataaatttcttttggtgg

SEQ ID NO: 3218 - DNA, 23 bp, Homo sapiens
acaagttacagagggttaaacgg

SEQ ID NO: 3219 - DNA, 23 bp, Homo sapiens
ggctggctacacaccttcatagg

SEQ ID NO: 3220 - DNA, 23 bp, Homo sapiens
gctacttaagagaagggcttggg

SEQ ID NO: 3221 - DNA, 23 bp, Homo sapiens
aagacggttgatatttcttaggg

SEQ ID NO: 3222 - DNA, 23 bp, Homo sapiens
gtacatggattcaggcatattgg

SEQ ID NO: 3223 - DNA, 23 bp, Homo sapiens
gtaggttgtgggagagatgctgg

SEQ ID NO: 3224 - DNA, 23 bp, Homo sapiens
gtacaaacaccataaccaaatgg

SEQ ID NO: 3225 - DNA, 23 bp, Homo sapiens
ggtacttgtcaggtttataaggg

SEQ ID NO: 3226 - DNA, 23 bp, Homo sapiens
gataaaagtcaacagctgattgg

SEQ ID NO: 3227 - DNA, 23 bp, Homo sapiens
acaacaaaatgaacagactttgg

SEQ ID NO: 3228 - DNA, 23 bp, Homo sapiens
gagtctacctggattattgatgg

SEQ ID NO: 3229 - DNA, 23 bp, Homo sapiens
agatctttgcatgcaggcattgg

SEQ ID NO: 3230 - DNA, 23 bp, Homo sapiens
ttggctgctgacccattcatggg

SEQ ID NO: 3231 - DNA, 23 bp, Homo sapiens
aatggcctcctattgaccttagg

SEQ ID NO: 3232 - DNA, 23 bp, Homo sapiens
gattattctgtgagctaccttgg

SEQ ID NO: 3233 - DNA, 23 bp, Homo sapiens
aagactagtcagatctctaatgg

SEQ ID NO: 3234 - DNA, 23 bp, Homo sapiens
tctttcctattgaaggctatggg

SEQ ID NO: 3235 - DNA, 23 bp, Homo sapiens
aatcaaaggctgattttaagtgg

SEQ ID NO: 3236 - DNA, 23 bp, Homo sapiens
attagtgtattttttcagtccgg

SEQ ID NO: 3237 - DNA, 23 bp, Homo sapiens
ataggagacgtccaaatgatagg

SEQ ID NO: 3238 - DNA, 23 bp, Homo sapiens
tactaccctagagagcaattagg

SEQ ID NO: 3239 - DNA, 23 bp, Homo sapiens
ttagttgttaatttaagtaatgg

SEQ ID NO: 3240 - DNA, 23 bp, Homo sapiens
aggcaaacggaaactgcatttgg

SEQ ID NO: 3241 - DNA, 23 bp, Homo sapiens
tttatattccttagtccctcagg

SEQ ID NO: 3242 - DNA, 23 bp, Homo sapiens
attgaagtttatcaattagcagg

SEQ ID NO: 3243 - DNA, 23 bp, Homo sapiens
gaatttatcattcttctgaatgg

SEQ ID NO: 3244 - DNA, 23 bp, Homo sapiens
ctaaattatctgattttcatggg

SEQ ID NO: 3245 - DNA, 23 bp, Homo sapiens
tgttgtggttctgggtactaagg

SEQ ID NO: 3246 - DNA, 23 bp, Homo sapiens
gagagcttcttattgagaaaggg

SEQ ID NO: 3247 - DNA, 23 bp, Homo sapiens
attatagtacgcactaacttagg

SEQ ID NO: 3248 - DNA, 23 bp, Homo sapiens
atgacatgcagcattttaaaggg

SEQ ID NO: 3249 - DNA, 23 bp, Homo sapiens
tttcttgctggcttctggcgtgg

SEQ ID NO: 3250 - DNA, 23 bp, Homo sapiens
cattttgatgtcattaccatagg

SEQ ID NO: 3251 - DNA, 23 bp, Homo sapiens
ggcttgaatgtgacattgactgg

SEQ ID NO: 3252 - DNA, 23 bp, Homo sapiens
cttgtctgtgttacagcaatggg

SEQ ID NO: 3253 - DNA, 23 bp, Homo sapiens
agtttcttagttttgagctatgg

SEQ ID NO: 3254 - DNA, 23 bp, Homo sapiens
tcttgatctttgaatgaagttgg

SEQ ID NO: 3255 - DNA, 23 bp, Homo sapiens
ctactaaatggaacattgaatgg

SEQ ID NO: 3256 - DNA, 23 bp, Homo sapiens
aatcattgtggccagctcccagg

SEQ ID NO: 3257 - DNA, 23 bp, Homo sapiens
ttttattgccaaagtttcctagg

SEQ ID NO: 3258 - DNA, 23 bp, Homo sapiens
caaatgttatgtttgttgccagg

SEQ ID NO: 3259 - DNA, 23 bp, Homo sapiens
acagtcctttttatacatagtgg

SEQ ID NO: 3260 - DNA, 23 bp, Homo sapiens
aactaactcattgtttaaagagg

SEQ ID NO: 3261 - DNA, 23 bp, Homo sapiens
tttaatgtttaaattttgaatgg

SEQ ID NO: 3262 - DNA, 23 bp, Homo sapiens
ggattccttctcttacaaactgg

SEQ ID NO: 3263 - DNA, 23 bp, Homo sapiens
aactcaggcatcattcagattgg

SEQ ID NO: 3264 - DNA, 23 bp, Homo sapiens
tgtatcagcttgtttcagatagg

SEQ ID NO: 3265 - DNA, 23 bp, Homo sapiens
tcaaacttgctgtaaccctatgg

SEQ ID NO: 3266 - DNA, 23 bp, Homo sapiens
tgaattctaatgactgcaatggg

SEQ ID NO: 3267 - DNA, 23 bp, Homo sapiens
tcaaacttgaccatataaatcgg

SEQ ID NO: 3268 - DNA, 23 bp, Homo sapiens
ttatttctcatattgactaaagg

SEQ ID NO: 3269 - DNA, 23 bp, Homo sapiens
acatgggcctgatctcactatgg

SEQ ID NO: 3270 - DNA, 23 bp, Homo sapiens
tatagactctgattgagaaatgg

SEQ ID NO: 3271 - DNA, 23 bp, Homo sapiens
tctacagttcttttgccctctgg

SEQ ID NO: 3272 - DNA, 23 bp, Homo sapiens
ataaaacctcagtatgaaaacgg

SEQ ID NO: 3273 - DNA, 23 bp, Homo sapiens
ttatcaggatatgtttataaggg

SEQ ID NO: 3274 - DNA, 23 bp, Homo sapiens
cattaactgtttctatcaaaggg

SEQ ID NO: 3275 - DNA, 23 bp, Homo sapiens
cacaacatttagcaacagattgg

SEQ ID NO: 3276 - DNA, 23 bp, Homo sapiens
gacgatggagtgcagaatatggg

SEQ ID NO: 3277 - DNA, 23 bp, Homo sapiens
gtaggggatttggggttgaatgg

SEQ ID NO: 3278 - DNA, 23 bp, Homo sapiens
agaaaaaagaaaaaaataagagg

SEQ ID NO: 3279 - DNA, 23 bp, Homo sapiens
tcccagatctgagtcctgtaggg

SEQ ID NO: 3280 - DNA, 23 bp, Homo sapiens
ggggccactagtgtaaaaaaagg

SEQ ID NO: 3281 - DNA, 23 bp, Homo sapiens
ggccatctcacaaagctcattgg

SEQ ID NO: 3282 - DNA, 23 bp, Homo sapiens
ctccgttacacgtttacaaaggg

SEQ ID NO: 3283 - DNA, 23 bp, Homo sapiens
tcttgtggatttacattgccagg

SEQ ID NO: 3284 - DNA, 23 bp, Homo sapiens
tattgacctttaatataaaacgg

SEQ ID NO: 3285 - DNA, 23 bp, Homo sapiens
ttatactttgttacttcaaaggg

SEQ ID NO: 3286 - DNA, 23 bp, Homo sapiens
aactttttattgtcactaagagg

SEQ ID NO: 3287 - DNA, 23 bp, Homo sapiens
ggaagcccatagccttcaatagg

SEQ ID NO: 3288 - DNA, 23 bp, Homo sapiens
acatcttatgacaaatcaatagg

SEQ ID NO: 3289 - DNA, 23 bp, Homo sapiens
gtgctgctgcccctcagcatggg

SEQ ID NO: 3290 - DNA, 23 bp, Homo sapiens
cctgctctcgtctttataagagg

SEQ ID NO: 3291 - DNA, 23 bp, Homo sapiens
gcttattttaaatttaatgatgg

SEQ ID NO: 3292 - DNA, 23 bp, Homo sapiens
tatgaaatatgtcaaacaactgg

SEQ ID NO: 3293 - DNA, 23 bp, Homo sapiens
gttcccatatgaacactgtttgg

SEQ ID NO: 3294 - DNA, 23 bp, Homo sapiens
gctaaaatgtaagagatgtttgg

SEQ ID NO: 3295 - DNA, 23 bp, Homo sapiens
cactttcatttattcgggggagg

SEQ ID NO: 3296 - DNA, 23 bp, Homo sapiens
agaactgtagtttctccatcagg

SEQ ID NO: 3297 - DNA, 23 bp, Homo sapiens
ctacttctcagaagctctgttgg

SEQ ID NO: 3298 - DNA, 23 bp, Homo sapiens
agacagggcttagctatattcgg

SEQ ID NO: 3299 - DNA, 23 bp, Homo sapiens
cattgaatgatatttacaattgg

SEQ ID NO: 3300 - DNA, 23 bp, Homo sapiens
cagtttatctcctaaatatgagg

SEQ ID NO: 3301 - DNA, 23 bp, Homo sapiens
ttaagatatttagtatatagtgg

SEQ ID NO: 3302 - DNA, 23 bp, Homo sapiens
aatcaaggctaagctgcattagg

SEQ ID NO: 3303 - DNA, 23 bp, Homo sapiens
ctccatattcctaagccaacagg

SEQ ID NO: 3304 - DNA, 23 bp, Homo sapiens
ccctgcagaattgggattgaggg

SEQ ID NO: 3305 - DNA, 23 bp, Homo sapiens
ggatttcagttggaaggcattgg

SEQ ID NO: 3306 - DNA, 23 bp, Homo sapiens
ctttttgctgatttccctgttgg

SEQ ID NO: 3307 - DNA, 23 bp, Homo sapiens
caaaatgtattgctgtgaaaggg

SEQ ID NO: 3308 - DNA, 23 bp, Homo sapiens
ggacatggaacttacttgttcgg

SEQ ID NO: 3309 - DNA, 23 bp, Homo sapiens
caatatttctttaggtcaaaggg

SEQ ID NO: 3310 - DNA, 23 bp, Homo sapiens
gcaacagaatagcagattaaggg

SEQ ID NO: 3311 - DNA, 23 bp, Homo sapiens
cctcctccaggaagatttgaggg

SEQ ID NO: 3312 - DNA, 23 bp, Homo sapiens
tgttctttacacttttcaaatgg

SEQ ID NO: 3313 - DNA, 23 bp, Homo sapiens
tgtaagagaaaagtaccaacagg

SEQ ID NO: 3314 - DNA, 23 bp, Homo sapiens
tattaaataatcaaacaagttgg

SEQ ID NO: 3315 - DNA, 23 bp, Homo sapiens
gtatcagcttgtttcagataggg

SEQ ID NO: 3316 - DNA, 23 bp, Homo sapiens
tcaccggccattttcctttgagg

SEQ ID NO: 3317 - DNA, 23 bp, Homo sapiens
gcaaacattttgatcaaagttgg

SEQ ID NO: 3318 - DNA, 23 bp, Homo sapiens
ttaggtactgtcatagtgttggg

SEQ ID NO: 3319 - DNA, 23 bp, Homo sapiens
ttatcagtttgattcattaaggg

SEQ ID NO: 3320 - DNA, 23 bp, Homo sapiens
tcctttgcatctaatatgaatgg

SEQ ID NO: 3321 - DNA, 23 bp, Homo sapiens
ttttaacttaaatcattgaatgg

SEQ ID NO: 3322 - DNA, 23 bp, Homo sapiens
ggaagtgtgaataaaagttaggg

SEQ ID NO: 3323 - DNA, 23 bp, Homo sapiens
gctctttactccaacagaatagg

SEQ ID NO: 3324 - DNA, 23 bp, Homo sapiens
tattatggatttacaaaatgagg

SEQ ID NO: 3325 - DNA, 23 bp, Homo sapiens
ttaatttcctccaaagccttggg

SEQ ID NO: 3326 - DNA, 23 bp, Homo sapiens
attatattaaaaaactagattgg

SEQ ID NO: 3327 - DNA, 23 bp, Homo sapiens
aaaatatccctgattatcatagg

SEQ ID NO: 3328 - DNA, 23 bp, Homo sapiens
gtaacagacacaaggcttaaggg

SEQ ID NO: 3329 - DNA, 23 bp, Homo sapiens
tttaatttcctccaaagccttgg

SEQ ID NO: 3330 - DNA, 23 bp, Homo sapiens
tttgccccggagcccggcattgg

SEQ ID NO: 3331 - DNA, 23 bp, Homo sapiens
taagtattagttctgttggttgg

SEQ ID NO: 3332 - DNA, 23 bp, Homo sapiens
ttagaaagctaattttatatggg

SEQ ID NO: 3333 - DNA, 23 bp, Homo sapiens
ctctctactgaagtgattgaagg

SEQ ID NO: 3334 - DNA, 23 bp, Homo sapiens
cacattacttggaaattaagtgg

SEQ ID NO: 3335 - DNA, 23 bp, Homo sapiens
gttaaaagggagccagaataggg

SEQ ID NO: 3336 - DNA, 23 bp, Homo sapiens
catcggtctctaaataaacttgg

SEQ ID NO: 3337 - DNA, 23 bp, Homo sapiens
caagcactgttggttttcatagg

SEQ ID NO: 3338 - DNA, 23 bp, Homo sapiens
ctgtgttttgatagttaaaaggg

SEQ ID NO: 3339 - DNA, 23 bp, Homo sapiens
atatttagcaaaagtcataaagg

SEQ ID NO: 3340 - DNA, 23 bp, Homo sapiens
tgccagggagatgaaaattaggg

SEQ ID NO: 3341 - DNA, 23 bp, Homo sapiens
ttataagccggtctcacaattgg

SEQ ID NO: 3342 - DNA, 23 bp, Homo sapiens
tgtatcttttttttccaaaacgg

SEQ ID NO: 3343 - DNA, 23 bp, Homo sapiens
gtaaaatctgattttctaagtgg

SEQ ID NO: 3344 - DNA, 23 bp, Homo sapiens
ctttttatagtggtggggggagg

SEQ ID NO: 3345 - DNA, 23 bp, Homo sapiens
actcagttataggaagtaacagg

SEQ ID NO: 3346 - DNA, 23 bp, Homo sapiens
aaaacactaacacatcataatgg

SEQ ID NO: 3347 - DNA, 23 bp, Homo sapiens
ctcattactctttaaccaaaagg

SEQ ID NO: 3348 - DNA, 23 bp, Homo sapiens
tgttcattaatgactggctctgg

SEQ ID NO: 3349 - DNA, 23 bp, Homo sapiens
tacattctcatttcattacatgg

SEQ ID NO: 3350 - DNA, 23 bp, Homo sapiens
tggtgtctagcaaagttaaaggg

SEQ ID NO: 3351 - DNA, 23 bp, Homo sapiens
gtatagaactttgtattgtatgg

SEQ ID NO: 3352 - DNA, 23 bp, Homo sapiens
gtattatatgtaagtctcttcgg

SEQ ID NO: 3353 - DNA, 23 bp, Homo sapiens
aatttactctcaaattaagttgg

SEQ ID NO: 3354 - DNA, 23 bp, Homo sapiens
gctctcccgcacaatggcattgg

SEQ ID NO: 3355 - DNA, 23 bp, Homo sapiens
atttttttagtgcagtgtttggg

SEQ ID NO: 3356 - DNA, 23 bp, Homo sapiens
gtaaaataaatatttagaatggg

SEQ ID NO: 3357 - DNA, 23 bp, Homo sapiens
ctgttgttccttagtattgaggg

SEQ ID NO: 3358 - DNA, 23 bp, Homo sapiens
gaactggagttcaatttgttcgg

SEQ ID NO: 3359 - DNA, 23 bp, Homo sapiens
atacagtagtcagttgaaatggg

SEQ ID NO: 3360 - DNA, 23 bp, Homo sapiens
cctgttcatgtatttttgaatgg

SEQ ID NO: 3361 - DNA, 23 bp, Homo sapiens
tgttgatcagtctcaccttatgg

SEQ ID NO: 3362 - DNA, 23 bp, Homo sapiens
ctatgtaatacagaatctttcgg

SEQ ID NO: 3363 - DNA, 23 bp, Homo sapiens
gaagtaatcaaccttggaatagg

SEQ ID NO: 3364 - DNA, 23 bp, Homo sapiens
atataaattatacatttaagagg

SEQ ID NO: 3365 - DNA, 23 bp, Homo sapiens
cttttcatgacttttcccattgg

SEQ ID NO: 3366 - DNA, 23 bp, Homo sapiens
tcaagttgtttcctgggtgtggg

SEQ ID NO: 3367 - DNA, 23 bp, Homo sapiens
tattttttaaacagatcaacagg

SEQ ID NO: 3368 - DNA, 23 bp, Homo sapiens
aatgcatttcaataaatatgagg

SEQ ID NO: 3369 - DNA, 23 bp, Homo sapiens
ggccacacttggaattgaaatgg

SEQ ID NO: 3370 - DNA, 23 bp, Homo sapiens
ttacagctttgtgaaacaattgg

SEQ ID NO: 3371 - DNA, 23 bp, Homo sapiens
gtatttcaggatttcacatcagg

SEQ ID NO: 3372 - DNA, 23 bp, Homo sapiens
ttagtcttatccatcttgcttgg

SEQ ID NO: 3373 - DNA, 23 bp, Homo sapiens
gttttaatctgttatactgcagg

SEQ ID NO: 3374 - DNA, 23 bp, Homo sapiens
accgtcagagtaagtcttaaggg

SEQ ID NO: 3375 - DNA, 23 bp, Homo sapiens
tgagccttctttaatggtgctgg

SEQ ID NO: 3376 - DNA, 23 bp, Homo sapiens
atgtttctcaaggcaggttaggg

SEQ ID NO: 3377 - DNA, 23 bp, Homo sapiens
ccaagaactgcagctctacttgg

SEQ ID NO: 3378 - DNA, 23 bp, Homo sapiens
tgataaatgaggtcagatattgg

SEQ ID NO: 3379 - DNA, 23 bp, Homo sapiens
acttattgttggctttaaaaggg

SEQ ID NO: 3380 - DNA, 23 bp, Homo sapiens
cgaaggagacaattcacaaaagg

SEQ ID NO: 3381 - DNA, 23 bp, Homo sapiens
aactatctattaatatcattcgg

SEQ ID NO: 3382 - DNA, 23 bp, Homo sapiens
ataataatactgatctctattgg

SEQ ID NO: 3383 - DNA, 23 bp, Homo sapiens
tagtgaacctgcaaatcaatagg

SEQ ID NO: 3384 - DNA, 23 bp, Homo sapiens
ctaactcttaaccattttgaggg

SEQ ID NO: 3385 - DNA, 23 bp, Homo sapiens
gtgcatttgcccctagttaaggg

SEQ ID NO: 3386 - DNA, 23 bp, Homo sapiens
gcaagaaatttcatgtagttggg

SEQ ID NO: 3387 - DNA, 23 bp, Homo sapiens
gcttttgtcaagctaaaatctgg

SEQ ID NO: 3388 - DNA, 23 bp, Homo sapiens
tcagggcattcagatctatcagg

SEQ ID NO: 3389 - DNA, 23 bp, Homo sapiens
gggaaattactaatgaatgttgg

SEQ ID NO: 3390 - DNA, 23 bp, Homo sapiens
actggcactttttagctgtaagg

SEQ ID NO: 3391 - DNA, 23 bp, Homo sapiens
ccttgatcatattttctacaagg

SEQ ID NO: 3392 - DNA, 23 bp, Homo sapiens
tttctagccattctgacaattgg

SEQ ID NO: 3393 - DNA, 23 bp, Homo sapiens
ccaaaacaaatcagtttaagagg

SEQ ID NO: 3394 - DNA, 23 bp, Homo sapiens
cagaaaatgtatctttaaaaggg

SEQ ID NO: 3395 - DNA, 23 bp, Homo sapiens
cctggggttatcaagatactagg

SEQ ID NO: 3396 - DNA, 23 bp, Homo sapiens
ttttgttctgaaattttccttgg

SEQ ID NO: 3397 - DNA, 23 bp, Homo sapiens
gtaattgtttcacatttaagagg

SEQ ID NO: 3398 - DNA, 23 bp, Homo sapiens
ttgcaaccgtaatctgataaagg

SEQ ID NO: 3399 - DNA, 23 bp, Homo sapiens
tttctcatggtacttaactaagg

SEQ ID NO: 3400 - DNA, 23 bp, Homo sapiens
gcttaggtatttcctcataaggg

SEQ ID NO: 3401 - DNA, 23 bp, Homo sapiens
ttcagttgtattagtggcagtgg

SEQ ID NO: 3402 - DNA, 23 bp, Homo sapiens
gggggcgtggggccaaacagagg

SEQ ID NO: 3403 - DNA, 23 bp, Homo sapiens
ggaaattatgtgacaccagctgg

SEQ ID NO: 3404 - DNA, 23 bp, Homo sapiens
acttagatttgttaaatatgagg

SEQ ID NO: 3405 - DNA, 23 bp, Homo sapiens
aggtccttatgggtgtttgatgg

SEQ ID NO: 3406 - DNA, 23 bp, Homo sapiens
catttgcaaaacaatttaagagg

SEQ ID NO: 3407 - DNA, 23 bp, Homo sapiens
ggtagatgtatataaggtttggg

SEQ ID NO: 3408 - DNA, 23 bp, Homo sapiens
gccactgcagtcctgaaggttgg

SEQ ID NO: 3409 - DNA, 23 bp, Homo sapiens
cacatttcccaaggctttggagg

SEQ ID NO: 3410 - DNA, 23 bp, Homo sapiens
ttttttctaaaacagtagattgg

SEQ ID NO: 3411 - DNA, 23 bp, Homo sapiens
actccaattgttataaaagaagg

SEQ ID NO: 3412 - DNA, 23 bp, Homo sapiens
tttaatgatattggaaaaagagg

SEQ ID NO: 3413 - DNA, 23 bp, Homo sapiens
cttccaacagagattttagttgg

SEQ ID NO: 3414 - DNA, 23 bp, Homo sapiens
agtttaatatatttgatactagg

SEQ ID NO: 3415 - DNA, 23 bp, Homo sapiens
aaaagaaaattattgtataaggg

SEQ ID NO: 3416 - DNA, 23 bp, Homo sapiens
cacttgtaatccatccttaaggg

SEQ ID NO: 3417 - DNA, 23 bp, Homo sapiens
tgatttcttcaaaggcctgctgg

SEQ ID NO: 3418 - DNA, 23 bp, Homo sapiens
gaaccccattcctcactaatggg

SEQ ID NO: 3419 - DNA, 23 bp, Homo sapiens
ttaatctatgatgaaggaaatgg

SEQ ID NO: 3420 - DNA, 23 bp, Homo sapiens
aagctgattgattcattaagagg

SEQ ID NO: 3421 - DNA, 23 bp, Homo sapiens
gtttgtttatttgtttctgcagg

SEQ ID NO: 3422 - DNA, 23 bp, Homo sapiens
agaaaattatctttaaagaaagg

SEQ ID NO: 3423 - DNA, 23 bp, Homo sapiens
tctgagctttaagctatcattgg

SEQ ID NO: 3424 - DNA, 23 bp, Homo sapiens
ttatatgcatatatacagttagg

SEQ ID NO: 3425 - DNA, 23 bp, Homo sapiens
tagactttatggaggaagattgg

SEQ ID NO: 3426 - DNA, 23 bp, Homo sapiens
aagatttctgaatgtaagaaagg

SEQ ID NO: 3427 - DNA, 23 bp, Homo sapiens
ccatatgatctaaaatctattgg

SEQ ID NO: 3428 - DNA, 23 bp, Homo sapiens
atacagtgatctcttttaaaggg

SEQ ID NO: 3429 - DNA, 23 bp, Homo sapiens
atatgctcatgagcttcctttgg

SEQ ID NO: 3430 - DNA, 23 bp, Homo sapiens
ggaaagatttgaaaattcattgg

SEQ ID NO: 3431 - DNA, 23 bp, Homo sapiens
accagtggttgacagaagtatgg

SEQ ID NO: 3432 - DNA, 23 bp, Homo sapiens
agatggaagccagcatcaatagg

SEQ ID NO: 3433 - DNA, 23 bp, Homo sapiens
gtatcttcaccccaaccttcagg

SEQ ID NO: 3434 - DNA, 23 bp, Homo sapiens
aagcttttgtgcaaattagttgg

SEQ ID NO: 3435 - DNA, 23 bp, Homo sapiens
gcctccccttatttttatgtagg

SEQ ID NO: 3436 - DNA, 23 bp, Homo sapiens
gcgtaatgaaaaacgatagaagg

SEQ ID NO: 3437 - DNA, 23 bp, Homo sapiens
tattttgcaacagtataataggg

SEQ ID NO: 3438 - DNA, 23 bp, Homo sapiens
ggaccaacacagaaatatatagg

SEQ ID NO: 3439 - DNA, 23 bp, Homo sapiens
aagcaaatcatcagacttaaggg

SEQ ID NO: 3440 - DNA, 23 bp, Homo sapiens
gaagagctagaggattcctttgg

SEQ ID NO: 3441 - DNA, 23 bp, Homo sapiens
actgtagacgggtaaataaaagg

SEQ ID NO: 3442 - DNA, 23 bp, Homo sapiens
ttaaggcttttataatcattcgg

SEQ ID NO: 3443 - DNA, 23 bp, Homo sapiens
tgaggaaagctgggttttagtgg

SEQ ID NO: 3444 - DNA, 23 bp, Homo sapiens
accacaagtgaaaagcagtatgg

SEQ ID NO: 3445 - DNA, 23 bp, Homo sapiens
gtttttgtggattcactgcttgg

SEQ ID NO: 3446 - DNA, 23 bp, Homo sapiens
cccttgtctgatttcagtaaagg

SEQ ID NO: 3447 - DNA, 23 bp, Homo sapiens
catggttgcctattgacttaggg

SEQ ID NO: 3448 - DNA, 23 bp, Homo sapiens
gtgcctgctttatctgtgcttgg

SEQ ID NO: 3449 - DNA, 23 bp, Homo sapiens
gaaactctgttcctgtaaacagg

SEQ ID NO: 3450 - DNA, 23 bp, Homo sapiens
ctttgtattttgtcgatgatagg

SEQ ID NO: 3451 - DNA, 23 bp, Homo sapiens
aatctcaattgtttgccaaatgg

SEQ ID NO: 3452 - DNA, 23 bp, Homo sapiens
ccaagactattacaataaaacgg

SEQ ID NO: 3453 - DNA, 23 bp, Homo sapiens
aatttgcatgaatatacaaatgg

SEQ ID NO: 3454 - DNA, 23 bp, Homo sapiens
aggaggctctttcacttttgcgg

SEQ ID NO: 3455 - DNA, 23 bp, Homo sapiens
ctaaacaattttcagtgtaaagg

SEQ ID NO: 3456 - DNA, 23 bp, Homo sapiens
cctcaaataattagagcaacagg

SEQ ID NO: 3457 - DNA, 23 bp, Homo sapiens
tgatatgtcaggccagtaacagg

SEQ ID NO: 3458 - DNA, 23 bp, Homo sapiens
atagtactgctcgtgtactatgg

SEQ ID NO: 3459 - DNA, 23 bp, Homo sapiens
cactataaaagaacagttaaggg

SEQ ID NO: 3460 - DNA, 23 bp, Homo sapiens
cctgttgctctaattatttgagg

SEQ ID NO: 3461 - DNA, 23 bp, Homo sapiens
ccatgacagcatgtgaagatagg

SEQ ID NO: 3462 - DNA, 23 bp, Homo sapiens
cactccctgttcaccaaatacgg

SEQ ID NO: 3463 - DNA, 23 bp, Homo sapiens
gctttttccttcttaaaagatgg

SEQ ID NO: 3464 - DNA, 23 bp, Homo sapiens
tggctctcaaaagatagtttggg

SEQ ID NO: 3465 - DNA, 23 bp, Homo sapiens
ctctggcatggagttcaaatagg

SEQ ID NO: 3466 - DNA, 23 bp, Homo sapiens
agaaaaggagattcaagatatgg

SEQ ID NO: 3467 - DNA, 23 bp, Homo sapiens
gtatctgctaagacaaaatcagg

SEQ ID NO: 3468 - DNA, 23 bp, Homo sapiens
gatttcaaggggaaaaattaggg

SEQ ID NO: 3469 - DNA, 23 bp, Homo sapiens
tcaaggcagttggttcgtattgg

SEQ ID NO: 3470 - DNA, 23 bp, Homo sapiens
ataaggaaagaggaaatataagg

SEQ ID NO: 3471 - DNA, 23 bp, Homo sapiens
tcactccatttttctccaatggg

SEQ ID NO: 3472 - DNA, 23 bp, Homo sapiens
caaagaggctagagattgattgg

SEQ ID NO: 3473 - DNA, 23 bp, Homo sapiens
tatgttcccattttaaaagtagg

SEQ ID NO: 3474 - DNA, 23 bp, Homo sapiens
atatatcagtaactttaaatggg

SEQ ID NO: 3475 - DNA, 23 bp, Homo sapiens
atttggctccagcgttttaaggg

SEQ ID NO: 3476 - DNA, 23 bp, Homo sapiens
aagcagatagaatcgtgaaatgg

SEQ ID NO: 3477 - DNA, 23 bp, Homo sapiens
agtttgctcagaactatataagg

SEQ ID NO: 3478 - DNA, 23 bp, Homo sapiens
tcacaaagctatgcattagaagg

SEQ ID NO: 3479 - DNA, 23 bp, Homo sapiens
acatttatttagaaatgtaatgg

SEQ ID NO: 3480 - DNA, 23 bp, Homo sapiens
catattatcgtgatgtagatagg

SEQ ID NO: 3481 - DNA, 23 bp, Homo sapiens
cattggtctctgtatttacaagg

SEQ ID NO: 3482 - DNA, 23 bp, Homo sapiens
tacttcctcattttagaaaaggg

SEQ ID NO: 3483 - DNA, 23 bp, Homo sapiens
ctattactgtattgattaagtgg

SEQ ID NO: 3484 - DNA, 23 bp, Homo sapiens
acctcactattcacggcaaccgg

SEQ ID NO: 3485 - DNA, 23 bp, Homo sapiens
gaaaaaatctatggtataagagg

SEQ ID NO: 3486 - DNA, 23 bp, Homo sapiens
ataattttgtaaaatcgaattgg

SEQ ID NO: 3487 - DNA, 23 bp, Homo sapiens
gtaagtttgtctgcagggcttgg

SEQ ID NO: 3488 - DNA, 23 bp, Homo sapiens
agagtattctttattttagcagg

SEQ ID NO: 3489 - DNA, 23 bp, Homo sapiens
acttacactatcttaccaatagg

SEQ ID NO: 3490 - DNA, 23 bp, Homo sapiens
atcctcttagaaatgacaattgg

SEQ ID NO: 3491 - DNA, 23 bp, Homo sapiens
ttttcatgacttttcccattggg

SEQ ID NO: 3492 - DNA, 23 bp, Homo sapiens
ctagcatgctatacatcatatgg

SEQ ID NO: 3493 - DNA, 23 bp, Homo sapiens
gcctgttccatgtttggtgtggg

SEQ ID NO: 3494 - DNA, 23 bp, Homo sapiens
gtatatttatctatttttatggg

SEQ ID NO: 3495 - DNA, 23 bp, Homo sapiens
ggaagggaaattggaacaacagg

SEQ ID NO: 3496 - DNA, 23 bp, Homo sapiens
tctcgtcttcctgttgtcttcgg

SEQ ID NO: 3497 - DNA, 23 bp, Homo sapiens
gttttatcattgcttttttgtgg

SEQ ID NO: 3498 - DNA, 23 bp, Homo sapiens
ataaatgagctggcctgtatagg

SEQ ID NO: 3499 - DNA, 23 bp, Homo sapiens
ttggtcctcttggatgtaaaagg

SEQ ID NO: 3500 - DNA, 23 bp, Homo sapiens
gttaagtgaacgcttttcattgg

SEQ ID NO: 3501 - DNA, 23 bp, Homo sapiens
tctcaacagcctaggatgattgg

SEQ ID NO: 3502 - DNA, 23 bp, Homo sapiens
tgagcagttaaatatttaaaggg

SEQ ID NO: 3503 - DNA, 23 bp, Homo sapiens
tctctcttgtgatgtgataaggg

SEQ ID NO: 3504 - DNA, 23 bp, Homo sapiens
ctataaatatagagtagaaatgg

SEQ ID NO: 3505 - DNA, 23 bp, Homo sapiens
ttacaaagctgagatatcttagg

SEQ ID NO: 3506 - DNA, 23 bp, Homo sapiens
atcctgtctggatgacctaatgg

SEQ ID NO: 3507 - DNA, 23 bp, Homo sapiens
tccacttcatactttcagttagg

SEQ ID NO: 3508 - DNA, 23 bp, Homo sapiens
gcacatacggcatcaaataatgg

SEQ ID NO: 3509 - DNA, 23 bp, Homo sapiens
cctgttgcataaaagtaataagg

SEQ ID NO: 3510 - DNA, 23 bp, Homo sapiens
taaaccagaatttaaattgaggg

SEQ ID NO: 3511 - DNA, 23 bp, Homo sapiens
acacttgtaatccatccttaagg

SEQ ID NO: 3512 - DNA, 23 bp, Homo sapiens
cttggaactatatttagtatagg

SEQ ID NO: 3513 - DNA, 23 bp, Homo sapiens
tcctaagtcagaagtctattggg

SEQ ID NO: 3514 - DNA, 23 bp, Homo sapiens
gcctctcgatattttacaacagg

SEQ ID NO: 3515 - DNA, 23 bp, Homo sapiens
tcaattgcttttttattgtaggg

SEQ ID NO: 3516 - DNA, 23 bp, Homo sapiens
ttttgccctctggtactttgtgg

SEQ ID NO: 3517 - DNA, 23 bp, Homo sapiens
aatgatatggtcttaatagaagg

SEQ ID NO: 3518 - DNA, 23 bp, Homo sapiens
tcttaaccatcacatgcctttgg

SEQ ID NO: 3519 - DNA, 23 bp, Homo sapiens
tcttttgtctgttatttccctgg

SEQ ID NO: 3520 - DNA, 23 bp, Homo sapiens
gcctaaagcactgagaattaggg

SEQ ID NO: 3521 - DNA, 23 bp, Homo sapiens
tcttgtttcataagaaaaacagg

SEQ ID NO: 3522 - DNA, 23 bp, Homo sapiens
atacgttatttagctcccttagg

SEQ ID NO: 3523 - DNA, 23 bp, Homo sapiens
ctttttaactaacagactaatgg

SEQ ID NO: 3524 - DNA, 23 bp, Homo sapiens
aaagttctcttttttttccatgg

SEQ ID NO: 3525 - DNA, 23 bp, Homo sapiens
ataatatgctgtaatatatgagg

SEQ ID NO: 3526 - DNA, 23 bp, Homo sapiens
gctatcctgcagatgctaatggg

SEQ ID NO: 3527 - DNA, 23 bp, Homo sapiens
attttaggttgtttttataaggg

SEQ ID NO: 3528 - DNA, 23 bp, Homo sapiens
ctacaaactatttatttgcttgg

SEQ ID NO: 3529 - DNA, 23 bp, Homo sapiens
aatagattccaagtatgtattgg

SEQ ID NO: 3530 - DNA, 23 bp, Homo sapiens
atatctcagaatgattttagagg

SEQ ID NO: 3531 - DNA, 23 bp, Homo sapiens
agcttagcgaacagtggcctggg

SEQ ID NO: 3532 - DNA, 23 bp, Homo sapiens
ttaagggtcaacgaaatctaagg

SEQ ID NO: 3533 - DNA, 23 bp, Homo sapiens
gtttgatttagcactcttaaggg

SEQ ID NO: 3534 - DNA, 23 bp, Homo sapiens
tcattacagcagctacaaaaagg

SEQ ID NO: 3535 - DNA, 23 bp, Homo sapiens
aatatactgacagtatatattgg

SEQ ID NO: 3536 - DNA, 23 bp, Homo sapiens
gctgtctaaatgcctcaaaatgg

SEQ ID NO: 3537 - DNA, 23 bp, Homo sapiens
caatacctacataaaaataaggg

SEQ ID NO: 3538 - DNA, 23 bp, Homo sapiens
gtgtaattgctaaatattgtagg

SEQ ID NO: 3539 - DNA, 23 bp, Homo sapiens
gtagggattagttttaaataggg

SEQ ID NO: 3540 - DNA, 23 bp, Homo sapiens
tatttttaagtattattagtagg

SEQ ID NO: 3541 - DNA, 23 bp, Homo sapiens
attgaaatcctaggaaactttgg

SEQ ID NO: 3542 - DNA, 23 bp, Homo sapiens
ttttccacagtgatccatattgg

SEQ ID NO: 3543 - DNA, 23 bp, Homo sapiens
tcaaacgtgcaaaatatgtttgg

SEQ ID NO: 3544 - DNA, 23 bp, Homo sapiens
gtgtgtgtacattcacaatttgg

SEQ ID NO: 3545 - DNA, 23 bp, Homo sapiens
actatatatcccattttaagagg

SEQ ID NO: 3546 - DNA, 23 bp, Homo sapiens
aattccagttttatcatgatagg

SEQ ID NO: 3547 - DNA, 23 bp, Homo sapiens
tttctcttcttaaaagctaaagg

SEQ ID NO: 3548 - DNA, 23 bp, Homo sapiens
aattaagtgtcatcatctaatgg

SEQ ID NO: 3549 - DNA, 23 bp, Homo sapiens
gattttcctttcatggactaagg

SEQ ID NO: 3550 - DNA, 23 bp, Homo sapiens
gattagaagggaacgtaatcagg

SEQ ID NO: 3551 - DNA, 23 bp, Homo sapiens
gcttggtctgattgatttgaagg

SEQ ID NO: 3552 - DNA, 23 bp, Homo sapiens
gacccacaattcaaacgtttggg

SEQ ID NO: 3553 - DNA, 23 bp, Homo sapiens
ttaacagtattaagatcataagg

SEQ ID NO: 3554 - DNA, 23 bp, Homo sapiens
tgttgcctgtagtaacaaatagg

SEQ ID NO: 3555 - DNA, 23 bp, Homo sapiens
attctaggtatgttccaaaaagg

SEQ ID NO: 3556 - DNA, 23 bp, Homo sapiens
aggaattcacaaacacagatagg

SEQ ID NO: 3557 - DNA, 23 bp, Homo sapiens
cttagaataaacgtatcctttgg

SEQ ID NO: 3558 - DNA, 23 bp, Homo sapiens
aaagtccccctaagttttagagg

SEQ ID NO: 3559 - DNA, 23 bp, Homo sapiens
gggcagctttctgaactgattgg

SEQ ID NO: 3560 - DNA, 23 bp, Homo sapiens
agaaatctgtgaataaataaagg

SEQ ID NO: 3561 - DNA, 23 bp, Homo sapiens
atctcaggttcctctccctttgg

SEQ ID NO: 3562 - DNA, 23 bp, Homo sapiens
gttcactgagcataatgtattgg

SEQ ID NO: 3563 - DNA, 23 bp, Homo sapiens
cagaatgccttaaaaagaaatgg

SEQ ID NO: 3564 - DNA, 23 bp, Homo sapiens
ggaaattaggggtaaatagatgg

SEQ ID NO: 3565 - DNA, 23 bp, Homo sapiens
gtgccattaatattacaaaatgg

SEQ ID NO: 3566 - DNA, 23 bp, Homo sapiens
ttaatttcctaggaggagttggg

SEQ ID NO: 3567 - DNA, 23 bp, Homo sapiens
tcagatgcggaaatttcatttgg

SEQ ID NO: 3568 - DNA, 23 bp, Homo sapiens
gtgctccaaaaatttttagtagg

SEQ ID NO: 3569 - DNA, 23 bp, Homo sapiens
ttctcattaacaaatgtagatgg

SEQ ID NO: 3570 - DNA, 23 bp, Homo sapiens
ggggaggtgaaaaagatttacgg

SEQ ID NO: 3571 - DNA, 23 bp, Homo sapiens
tcataagccccaaattttgatgg

SEQ ID NO: 3572 - DNA, 23 bp, Homo sapiens
gctgaaagccttggaactttcgg

SEQ ID NO: 3573 - DNA, 23 bp, Homo sapiens
tgctcttttggtgtgatcaaggg

SEQ ID NO: 3574 - DNA, 23 bp, Homo sapiens
gagagaatctgtttacatattgg

SEQ ID NO: 3575 - DNA, 23 bp, Homo sapiens
acatccatcaaaaaactctttgg

SEQ ID NO: 3576 - DNA, 23 bp, Homo sapiens
ttactgacctctaaaacttaggg

SEQ ID NO: 3577 - DNA, 23 bp, Homo sapiens
tcaaagaaggaagagttcattgg

SEQ ID NO: 3578 - DNA, 23 bp, Homo sapiens
tttttcccattattgctagaagg

SEQ ID NO: 3579 - DNA, 23 bp, Homo sapiens
gtatagttctatgtgctataagg

SEQ ID NO: 3580 - DNA, 23 bp, Homo sapiens
ttgactcccagctcaactttggg

SEQ ID NO: 3581 - DNA, 23 bp, Homo sapiens
ttaaaagtcaattttgaatccgg

SEQ ID NO: 3582 - DNA, 23 bp, Homo sapiens
aacttcatcctaaggtcaatagg

SEQ ID NO: 3583 - DNA, 23 bp, Homo sapiens
ctattttgaagcaaaggtttagg

SEQ ID NO: 3584 - DNA, 23 bp, Homo sapiens
ttatgcgtagggttctgtttagg

SEQ ID NO: 3585 - DNA, 23 bp, Homo sapiens
gtacgtatttaaaaacgattagg

SEQ ID NO: 3586 - DNA, 23 bp, Homo sapiens
tatggtaaaataaagtataaggg

SEQ ID NO: 3587 - DNA, 23 bp, Homo sapiens
tcattttattcccttatttaggg

SEQ ID NO: 3588 - DNA, 23 bp, Homo sapiens
tgaattgaatttttgaagatggg

SEQ ID NO: 3589 - DNA, 23 bp, Homo sapiens
gctagtttatgtgctatgttagg

SEQ ID NO: 3590 - DNA, 23 bp, Homo sapiens
tgctctgtgaagaaagaaattgg

SEQ ID NO: 3591 - DNA, 23 bp, Homo sapiens
attgactatgaatttatagatgg

SEQ ID NO: 3592 - DNA, 23 bp, Homo sapiens
tatttactcaacttacactatgg

SEQ ID NO: 3593 - DNA, 23 bp, Homo sapiens
ctgtcaactctctagaagatagg

SEQ ID NO: 3594 - DNA, 23 bp, Homo sapiens
tttttacaggaaaatacattagg

SEQ ID NO: 3595 - DNA, 23 bp, Homo sapiens
ctgtcaacagataatttagaagg

SEQ ID NO: 3596 - DNA, 23 bp, Homo sapiens
gctatggcaccttcagtgatagg

SEQ ID NO: 3597 - DNA, 23 bp, Homo sapiens
gcaatccatttctattatatggg

SEQ ID NO: 3598 - DNA, 23 bp, Homo sapiens
aaccagccccagaagtaaactgg

SEQ ID NO: 3599 - DNA, 23 bp, Homo sapiens
agctagtcttaaaatcaaaaagg

SEQ ID NO: 3600 - DNA, 23 bp, Homo sapiens
tgctggctatacacttttaaggg

SEQ ID NO: 3601 - DNA, 23 bp, Homo sapiens
tcatggttgcctattgacttagg

SEQ ID NO: 3602 - DNA, 23 bp, Homo sapiens
tcaaatagataccttttaaaggg

SEQ ID NO: 3603 - DNA, 23 bp, Homo sapiens
ttaatatcattgtatgcaactgg

SEQ ID NO: 3604 - DNA, 23 bp, Homo sapiens
gctcctgcttgagctattgttgg

SEQ ID NO: 3605 - DNA, 23 bp, Homo sapiens
ggaagtcaatttaaaataagagg

SEQ ID NO: 3606 - DNA, 23 bp, Homo sapiens
tactttccttaatctataaaggg

SEQ ID NO: 3607 - DNA, 23 bp, Homo sapiens
agtagtcattctaaaaagattgg

SEQ ID NO: 3608 - DNA, 23 bp, Homo sapiens
tggctgttaatatctcaaaaagg

SEQ ID NO: 3609 - DNA, 23 bp, Homo sapiens
actacggcaaatttacaaactgg

SEQ ID NO: 3610 - DNA, 23 bp, Homo sapiens
ttataaactggcaagaatatcgg

SEQ ID NO: 3611 - DNA, 23 bp, Homo sapiens
tgttggtccttcataatacttgg

SEQ ID NO: 3612 - DNA, 23 bp, Homo sapiens
gatattttggagcattataaagg

SEQ ID NO: 3613 - DNA, 23 bp, Homo sapiens
acattcaaagtgatgagctttgg

SEQ ID NO: 3614 - DNA, 23 bp, Homo sapiens
atttgccagcattaataataggg

SEQ ID NO: 3615 - DNA, 23 bp, Homo sapiens
agggtagctgtataattaaaagg

SEQ ID NO: 3616 - DNA, 23 bp, Homo sapiens
atagagaattattatatcattgg

SEQ ID NO: 3617 - DNA, 23 bp, Homo sapiens
gttcagaaccacgcacttgtagg

SEQ ID NO: 3618 - DNA, 23 bp, Homo sapiens
agagttaaaagaatttataatgg

SEQ ID NO: 3619 - DNA, 23 bp, Homo sapiens
tgatttctaccacagccttttgg

SEQ ID NO: 3620 - DNA, 23 bp, Homo sapiens
gctgtaatgttgacaatatctgg

SEQ ID NO: 3621 - DNA, 23 bp, Homo sapiens
ctttaaggaaagtttttaaaggg

SEQ ID NO: 3622 - DNA, 23 bp, Homo sapiens
tatcttgctttgctataaacagg

SEQ ID NO: 3623 - DNA, 23 bp, Homo sapiens
gtaggtttagaaaaaatctatgg

SEQ ID NO: 3624 - DNA, 23 bp, Homo sapiens
ttcactgtatgtgaacaaatagg

SEQ ID NO: 3625 - DNA, 23 bp, Homo sapiens
ttaatttatgagcctttgtctgg

SEQ ID NO: 3626 - DNA, 23 bp, Homo sapiens
tataatatgccaatgtctatagg

SEQ ID NO: 3627 - DNA, 23 bp, Homo sapiens
aagtctgatgatttgcttaaggg

SEQ ID NO: 3628 - DNA, 23 bp, Homo sapiens
cggctgttattcagttataatgg

SEQ ID NO: 3629 - DNA, 23 bp, Homo sapiens
taccatacgctaatcaactatgg

SEQ ID NO: 3630 - DNA, 23 bp, Homo sapiens
ttaaagctgctgaagtttgttgg

SEQ ID NO: 3631 - DNA, 23 bp, Homo sapiens
tgtttaggctgccattttaaggg

SEQ ID NO: 3632 - DNA, 23 bp, Homo sapiens
ttttccctcccaaatcataaagg

SEQ ID NO: 3633 - DNA, 23 bp, Homo sapiens
aggtttcactgaaccattagagg

SEQ ID NO: 3634 - DNA, 23 bp, Homo sapiens
atattcttacccttggaatcagg

SEQ ID NO: 3635 - DNA, 23 bp, Homo sapiens
tgcttcacttactccttaagagg

SEQ ID NO: 3636 - DNA, 23 bp, Homo sapiens
gtatatatacgtggcttatgagg

SEQ ID NO: 3637 - DNA, 23 bp, Homo sapiens
ggtaactgaggtgttcaatatgg

SEQ ID NO: 3638 - DNA, 23 bp, Homo sapiens
ttttcctgaccagaaataacagg

SEQ ID NO: 3639 - DNA, 23 bp, Homo sapiens
atggctagtttctcattaaaggg

SEQ ID NO: 3640 - DNA, 23 bp, Homo sapiens
aagcaaattttagaaataagagg

SEQ ID NO: 3641 - DNA, 23 bp, Homo sapiens
tatgtaactgttactaaatacgg

SEQ ID NO: 3642 - DNA, 23 bp, Homo sapiens
gattttcagcacctgctattggg

SEQ ID NO: 3643 - DNA, 23 bp, Homo sapiens
ccataactccaatttgctaatgg

SEQ ID NO: 3644 - DNA, 23 bp, Homo sapiens
agaaccgtgcccaatacttatgg

SEQ ID NO: 3645 - DNA, 23 bp, Homo sapiens
gtagctataagtgatttaacagg

SEQ ID NO: 3646 - DNA, 23 bp, Homo sapiens
atatggatcactgtggaaaaagg

SEQ ID NO: 3647 - DNA, 23 bp, Homo sapiens
ctttatcgtttagttattaaggg

SEQ ID NO: 3648 - DNA, 23 bp, Homo sapiens
ggagcatagctattcctaaatgg

SEQ ID NO: 3649 - DNA, 23 bp, Homo sapiens
gatttggggttgaatgggggggg

SEQ ID NO: 3650 - DNA, 23 bp, Homo sapiens
ccaggattacttgcctttgtagg

SEQ ID NO: 3651 - DNA, 23 bp, Homo sapiens
acagttcccaaggatttgtttgg

SEQ ID NO: 3652 - DNA, 23 bp, Homo sapiens
attccagaacaaattcaatatgg

SEQ ID NO: 3653 - DNA, 23 bp, Homo sapiens
tttctgttccttcccacaatagg

SEQ ID NO: 3654 - DNA, 23 bp, Homo sapiens
gacatgggcaacaaattagatgg

SEQ ID NO: 3655 - DNA, 23 bp, Homo sapiens
tgtgccttatatttcaaaatcgg

SEQ ID NO: 3656 - DNA, 23 bp, Homo sapiens
cacaatgcagaaatcattatagg

SEQ ID NO: 3657 - DNA, 23 bp, Homo sapiens
ccatcactttcacaaaactatgg

SEQ ID NO: 3658 - DNA, 23 bp, Homo sapiens
tatatgggaaaggttacattagg

SEQ ID NO: 3659 - DNA, 23 bp, Homo sapiens
cctgcaattggaaagatacttgg

SEQ ID NO: 3660 - DNA, 23 bp, Homo sapiens
gagtaattaaaagtgctttaggg

SEQ ID NO: 3661 - DNA, 23 bp, Homo sapiens
gacacagtctgaatagtaattgg

SEQ ID NO: 3662 - DNA, 23 bp, Homo sapiens
tttatatccactattgtgattgg

SEQ ID NO: 3663 - DNA, 23 bp, Homo sapiens
gcctttggagaggatgcattcgg

SEQ ID NO: 3664 - DNA, 23 bp, Homo sapiens
cacagtttactttatgcaaatgg

SEQ ID NO: 3665 - DNA, 23 bp, Homo sapiens
ctatgttactgaaaagtaactgg

SEQ ID NO: 3666 - DNA, 23 bp, Homo sapiens
ttagctcttccaacaataacagg

SEQ ID NO: 3667 - DNA, 23 bp, Homo sapiens
ccaaagttattttttccccttgg

SEQ ID NO: 3668 - DNA, 23 bp, Homo sapiens
gcaatagtccgtaaacttccggg

SEQ ID NO: 3669 - DNA, 23 bp, Homo sapiens
atatgctccctcattcttctggg

SEQ ID NO: 3670 - DNA, 23 bp, Homo sapiens
ttcttctcactgaatattaaggg

SEQ ID NO: 3671 - DNA, 23 bp, Homo sapiens
agtatttagagcaaaaaaaaagg

SEQ ID NO: 3672 - DNA, 23 bp, Homo sapiens
tccttgtgttattaaatagatgg

SEQ ID NO: 3673 - DNA, 23 bp, Homo sapiens
attactttcattaaaagaatagg

SEQ ID NO: 3674 - DNA, 23 bp, Homo sapiens
atggcactattgcctcaaaatgg

SEQ ID NO: 3675 - DNA, 23 bp, Homo sapiens
tatgctttgttttttctcaatgg

SEQ ID NO: 3676 - DNA, 23 bp, Homo sapiens
gcagtagctcagaatgagatagg

SEQ ID NO: 3677 - DNA, 23 bp, Homo sapiens
gcacagtaattattcattatggg

SEQ ID NO: 3678 - DNA, 23 bp, Homo sapiens
tctgagtctgaagcagaaactgg

SEQ ID NO: 3679 - DNA, 23 bp, Homo sapiens
ggcttatgatgttaatttagtgg

SEQ ID NO: 3680 - DNA, 23 bp, Homo sapiens
gttctttcagaacataataatgg

SEQ ID NO: 3681 - DNA, 23 bp, Homo sapiens
gagaagctaaagagtaaatcagg

SEQ ID NO: 3682 - DNA, 23 bp, Homo sapiens
gataaatcttagctacaatatgg

SEQ ID NO: 3683 - DNA, 23 bp, Homo sapiens
ttagcacctatgtcagtaattgg

SEQ ID NO: 3684 - DNA, 23 bp, Homo sapiens
agtattctcagagatgaaaaagg

SEQ ID NO: 3685 - DNA, 23 bp, Homo sapiens
cctcttttcagttcaaagaatgg

SEQ ID NO: 3686 - DNA, 23 bp, Homo sapiens
acagagtctatttctccattagg

SEQ ID NO: 3687 - DNA, 23 bp, Homo sapiens
ttagagtcagtgagtttattagg

SEQ ID NO: 3688 - DNA, 23 bp, Homo sapiens
atatggattgtctaagtcattgg

SEQ ID NO: 3689 - DNA, 23 bp, Homo sapiens
aaacaacccaaaattttaatggg

SEQ ID NO: 3690 - DNA, 23 bp, Homo sapiens
tttctaatagaagtataaaaagg

SEQ ID NO: 3691 - DNA, 23 bp, Homo sapiens
gagaatgtagatggcttaatggg

SEQ ID NO: 3692 - DNA, 23 bp, Homo sapiens
ataccacgctttgaaaatactgg

SEQ ID NO: 3693 - DNA, 23 bp, Homo sapiens
ataaaaggaaactttttagatgg

SEQ ID NO: 3694 - DNA, 23 bp, Homo sapiens
tagttatgtaaattattttaggg

SEQ ID NO: 3695 - DNA, 23 bp, Homo sapiens
agccacactgaaagaatatatgg

SEQ ID NO: 3696 - DNA, 23 bp, Homo sapiens
atatttagctatagtcgtttagg

SEQ ID NO: 3697 - DNA, 23 bp, Homo sapiens
gcatttaccatgcaagaaaaagg

SEQ ID NO: 3698 - DNA, 23 bp, Homo sapiens
cctttgccgatcagctttaaggg

SEQ ID NO: 3699 - DNA, 23 bp, Homo sapiens
tccacaactactaaaaaaaaagg

SEQ ID NO: 3700 - DNA, 23 bp, Homo sapiens
ggatccttgttataaacgtttgg

SEQ ID NO: 3701 - DNA, 23 bp, Homo sapiens
ttgtttttagaattattatctgg

SEQ ID NO: 3702 - DNA, 23 bp, Homo sapiens
atagaagctgaactctaaactgg

SEQ ID NO: 3703 - DNA, 23 bp, Homo sapiens
ggatgaacttcattataatctgg

SEQ ID NO: 3704 - DNA, 23 bp, Homo sapiens
agatgacatgtctaacaaaatgg

SEQ ID NO: 3705 - DNA, 23 bp, Homo sapiens
atgcagggtggtcaggtaaaagg

SEQ ID NO: 3706 - DNA, 23 bp, Homo sapiens
cttgtggtgctgctgagatttgg

SEQ ID NO: 3707 - DNA, 23 bp, Homo sapiens
actttgctgttgtccccatctgg

SEQ ID NO: 3708 - DNA, 23 bp, Homo sapiens
ttagggatatgattactcttggg

SEQ ID NO: 3709 - DNA, 23 bp, Homo sapiens
gctcccaagctacctttaactgg

SEQ ID NO: 3710 - DNA, 23 bp, Homo sapiens
ttatttgatagactagtaaaagg

SEQ ID NO: 3711 - DNA, 23 bp, Homo sapiens
tttactccgaaaaactatttcgg

SEQ ID NO: 3712 - DNA, 23 bp, Homo sapiens
ttaattatcacacactataaagg

SEQ ID NO: 3713 - DNA, 23 bp, Homo sapiens
tcaggagtctaggtttcttcagg

SEQ ID NO: 3714 - DNA, 23 bp, Homo sapiens
gccaggcattgtctgatttaggg

SEQ ID NO: 3715 - DNA, 23 bp, Homo sapiens
atgtatttctttgttaaagatgg

SEQ ID NO: 3716 - DNA, 23 bp, Homo sapiens
tgatattaacatgaaaaaattgg

SEQ ID NO: 3717 - DNA, 23 bp, Homo sapiens
cccacattgctggtaccgttggg

SEQ ID NO: 3718 - DNA, 23 bp, Homo sapiens
ctctaggctaaacatataaaagg

SEQ ID NO: 3719 - DNA, 23 bp, Homo sapiens
cataggagcctttggctaaaggg

SEQ ID NO: 3720 - DNA, 23 bp, Homo sapiens
tcaattccttgcatttttgcagg

SEQ ID NO: 3721 - DNA, 23 bp, Homo sapiens
agtgatttgcattatcctatagg

SEQ ID NO: 3722 - DNA, 23 bp, Homo sapiens
aagagaagtggaaggtttagagg

SEQ ID NO: 3723 - DNA, 23 bp, Homo sapiens
gatagattaaggaaagaaaaagg

SEQ ID NO: 3724 - DNA, 23 bp, Homo sapiens
ctacccgaaatatcattcttagg

SEQ ID NO: 3725 - DNA, 23 bp, Homo sapiens
aatttattcatgtataaaactgg

SEQ ID NO: 3726 - DNA, 23 bp, Homo sapiens
cggtgtgaaatagacaaaaatgg

SEQ ID NO: 3727 - DNA, 23 bp, Homo sapiens
gccatgggcttcattgtctatgg

SEQ ID NO: 3728 - DNA, 23 bp, Homo sapiens
ttgactgcccaaacctctaatgg

SEQ ID NO: 3729 - DNA, 23 bp, Homo sapiens
gcacagaatcatttttatatagg

SEQ ID NO: 3730 - DNA, 23 bp, Homo sapiens
ggtagatgtatttttaagctagg

SEQ ID NO: 3731 - DNA, 23 bp, Homo sapiens
gccaacatgcaataaaagtttgg

SEQ ID NO: 3732 - DNA, 23 bp, Homo sapiens
acacaggtgcgcaactttatagg

SEQ ID NO: 3733 - DNA, 23 bp, Homo sapiens
cttggaatgcaatctttcttggg

SEQ ID NO: 3734 - DNA, 23 bp, Homo sapiens
tttctactaaggcaacattttgg

SEQ ID NO: 3735 - DNA, 23 bp, Homo sapiens
agagcgatagagggagataaagg

SEQ ID NO: 3736 - DNA, 23 bp, Homo sapiens
cctatttctataaactttaaggg

SEQ ID NO: 3737 - DNA, 23 bp, Homo sapiens
tatgttattgaaatcatttaggg

SEQ ID NO: 3738 - DNA, 23 bp, Homo sapiens
ttcatcaccgtgattactaatgg

SEQ ID NO: 3739 - DNA, 23 bp, Homo sapiens
acaatgtagtgaaaataaattgg

SEQ ID NO: 3740 - DNA, 23 bp, Homo sapiens
cacacaccttttcaaataagagg

SEQ ID NO: 3741 - DNA, 23 bp, Homo sapiens
tgtccttcagatttagttagtgg

SEQ ID NO: 3742 - DNA, 23 bp, Homo sapiens
ttctatttagtgccatttagagg

SEQ ID NO: 3743 - DNA, 23 bp, Homo sapiens
actgtcctcaagaggaaattagg

SEQ ID NO: 3744 - DNA, 23 bp, Homo sapiens
cattaagctaagcaaataaatgg

SEQ ID NO: 3745 - DNA, 23 bp, Homo sapiens
tctcttcctttatcagattacgg

SEQ ID NO: 3746 - DNA, 23 bp, Homo sapiens
catttgtgctgtcaaattaaggg

SEQ ID NO: 3747 - DNA, 23 bp, Homo sapiens
ctagataaaattcaattgatagg

SEQ ID NO: 3748 - DNA, 23 bp, Homo sapiens
attttctttggttatataaaggg

SEQ ID NO: 3749 - DNA, 23 bp, Homo sapiens
agtcccagttataaattaatggg

SEQ ID NO: 3750 - DNA, 23 bp, Homo sapiens
gtataccaattgttcagttttgg

SEQ ID NO: 3751 - DNA, 23 bp, Homo sapiens
ttttatttactgcagctaaaagg

SEQ ID NO: 3752 - DNA, 23 bp, Homo sapiens
acattttctgtgtcacattaggg

SEQ ID NO: 3753 - DNA, 23 bp, Homo sapiens
gctctcttcaaatttggtatagg

SEQ ID NO: 3754 - DNA, 23 bp, Homo sapiens
gcactgtaaggtactttattggg

SEQ ID NO: 3755 - DNA, 23 bp, Homo sapiens
tgtccccaggaattctataatgg

SEQ ID NO: 3756 - DNA, 23 bp, Homo sapiens
ttaaaactcaaattatttgtagg

SEQ ID NO: 3757 - DNA, 23 bp, Homo sapiens
cagggcagagaattgcaaaatgg

SEQ ID NO: 3758 - DNA, 23 bp, Homo sapiens
catcttgtatgtaattttaaggg

SEQ ID NO: 3759 - DNA, 23 bp, Homo sapiens
ggaaaatatttcatttttaacgg

SEQ ID NO: 3760 - DNA, 23 bp, Homo sapiens
gccaccaaagagttttttgatgg

SEQ ID NO: 3761 - DNA, 23 bp, Homo sapiens
gtttctttcactgtggtaactgg

SEQ ID NO: 3762 - DNA, 23 bp, Homo sapiens
gcagatttagccaaattaacagg

SEQ ID NO: 3763 - DNA, 23 bp, Homo sapiens
tttacagaaactcatatataggg

SEQ ID NO: 3764 - DNA, 23 bp, Homo sapiens
ttactgtcttagaaaagtttagg

SEQ ID NO: 3765 - DNA, 23 bp, Homo sapiens
aataccagatgccacataaaagg

SEQ ID NO: 3766 - DNA, 23 bp, Homo sapiens
tcagagggcaagggaaaaaaagg

SEQ ID NO: 3767 - DNA, 23 bp, Homo sapiens
agatgaacaatccagatataggg

SEQ ID NO: 3768 - DNA, 23 bp, Homo sapiens
tatagagtagaaatggaaattgg

SEQ ID NO: 3769 - DNA, 23 bp, Homo sapiens
ctcagtacttaacattttaaggg

SEQ ID NO: 3770 - DNA, 23 bp, Homo sapiens
aggcattacatggggataaatgg

SEQ ID NO: 3771 - DNA, 23 bp, Homo sapiens
tctctgctcacaacattaactgg

SEQ ID NO: 3772 - DNA, 23 bp, Homo sapiens
tgttgttgagaggataaaaaagg

SEQ ID NO: 3773 - DNA, 23 bp, Homo sapiens
acaaatttgagtaagttatacgg

SEQ ID NO: 3774 - DNA, 23 bp, Homo sapiens
gcattaagtatccagcaaattgg

SEQ ID NO: 3775 - DNA, 23 bp, Homo sapiens
gtttactacttatttggttccgg

SEQ ID NO: 3776 - DNA, 23 bp, Homo sapiens
ccacttttccctaagtcaatagg

SEQ ID NO: 3777 - DNA, 23 bp, Homo sapiens
ccaagtatctttccaattgcagg

SEQ ID NO: 3778 - DNA, 23 bp, Homo sapiens
ccttaacttacttaaacaattgg

SEQ ID NO: 3779 - DNA, 23 bp, Homo sapiens
agaggtagcttttctgtcattgg

SEQ ID NO: 3780 - DNA, 23 bp, Homo sapiens
ccaggttttgtcaggcactatgg

SEQ ID NO: 3781 - DNA, 23 bp, Homo sapiens
ttaccatttttgcagatattggg

SEQ ID NO: 3782 - DNA, 23 bp, Homo sapiens
tgtattgtcaatcttccttctgg

SEQ ID NO: 3783 - DNA, 23 bp, Homo sapiens
gtaatgactatccctttaaaagg

SEQ ID NO: 3784 - DNA, 23 bp, Homo sapiens
gattttataaatgagtaatatgg

SEQ ID NO: 3785 - DNA, 23 bp, Homo sapiens
ttattaaccaacataaaatatgg

SEQ ID NO: 3786 - DNA, 23 bp, Homo sapiens
catacactctcaaagagatttgg

SEQ ID NO: 3787 - DNA, 23 bp, Homo sapiens
ttaatttgtaattagtctatagg

SEQ ID NO: 3788 - DNA, 23 bp, Homo sapiens
gttctatgacaagtgtaaaaagg

SEQ ID NO: 3789 - DNA, 23 bp, Homo sapiens
tgtactttaatgattctaatagg

SEQ ID NO: 3790 - DNA, 23 bp, Homo sapiens
ttatgactcctggacattttggg

SEQ ID NO: 3791 - DNA, 23 bp, Homo sapiens
tatgagaatgggaggataatagg

SEQ ID NO: 3792 - DNA, 23 bp, Homo sapiens
aggtgggctgccaggtaaattgg

SEQ ID NO: 3793 - DNA, 23 bp, Homo sapiens
tggaagtgtgaataaaagttagg

SEQ ID NO: 3794 - DNA, 23 bp, Homo sapiens
tcaagtctacccattcttctagg

SEQ ID NO: 3795 - DNA, 23 bp, Homo sapiens
tataatctcgacgtacaatttgg

SEQ ID NO: 3796 - DNA, 23 bp, Homo sapiens
aacacattctgctatatctatgg

SEQ ID NO: 3797 - DNA, 23 bp, Homo sapiens
aatgtgatattttatcaaattgg

SEQ ID NO: 3798 - DNA, 23 bp, Homo sapiens
tttaatggcgtaagtaaaactgg

SEQ ID NO: 3799 - DNA, 23 bp, Homo sapiens
attctgtcataattagtctatgg

SEQ ID NO: 3800 - DNA, 23 bp, Homo sapiens
ccatggcaggaagatttattggg

SEQ ID NO: 3801 - DNA, 23 bp, Homo sapiens
ttgtacttaataatagtcttagg

SEQ ID NO: 3802 - DNA, 23 bp, Homo sapiens
atagaaactcagctgaaataagg

SEQ ID NO: 3803 - DNA, 23 bp, Homo sapiens
tttgtatcacttaaaacattagg

SEQ ID NO: 3804 - DNA, 23 bp, Homo sapiens
gtattagatgtaacaaaaattgg

SEQ ID NO: 3805 - DNA, 23 bp, Homo sapiens
aatcccatttcacttttgatagg

SEQ ID NO: 3806 - DNA, 23 bp, Homo sapiens
ggattgagctcatttataaaagg

SEQ ID NO: 3807 - DNA, 23 bp, Homo sapiens
tttctgcatatatagaaaattgg

SEQ ID NO: 3808 - DNA, 23 bp, Homo sapiens
ccactgttctctataaaatatgg

SEQ ID NO: 3809 - DNA, 23 bp, Homo sapiens
ttatattgatgaacaggttttgg

SEQ ID NO: 3810 - DNA, 23 bp, Homo sapiens
ttatatatatacatttctttagg

SEQ ID NO: 3811 - DNA, 23 bp, Homo sapiens
gtagatgaatgtgatttaaatgg

SEQ ID NO: 3812 - DNA, 23 bp, Homo sapiens
agaaatccagtaatattaattgg

SEQ ID NO: 3813 - DNA, 23 bp, Homo sapiens
tagttgtcaaccttcaaaatagg

SEQ ID NO: 3814 - DNA, 23 bp, Homo sapiens
ttattaagaacaacttttgtagg

SEQ ID NO: 3815 - DNA, 23 bp, Homo sapiens
gctgaagaatggcaataaaaagg

SEQ ID NO: 3816 - DNA, 23 bp, Homo sapiens
tatatgggaatctaaataaaagg

SEQ ID NO: 3817 - DNA, 23 bp, Homo sapiens
gctgttatcgattcggtttaggg

SEQ ID NO: 3818 - DNA, 23 bp, Homo sapiens
tgtgtattaaatgttaaaattgg

SEQ ID NO: 3819 - DNA, 23 bp, Homo sapiens
gtatctatcttaggtatatatgg

SEQ ID NO: 3820 - DNA, 23 bp, Homo sapiens
ttagtgagatgaactgttaatgg

SEQ ID NO: 3821 - DNA, 23 bp, Homo sapiens
tcttaagcaccaacataaaaagg

SEQ ID NO: 3822 - DNA, 23 bp, Homo sapiens
acagttacccttactttagatgg

SEQ ID NO: 3823 - DNA, 23 bp, Homo sapiens
cctttcatcccatttggttatgg

SEQ ID NO: 3824 - DNA, 23 bp, Homo sapiens
attccttcttttataacaattgg

SEQ ID NO: 3825 - DNA, 23 bp, Homo sapiens
acaatagatgaacaagaaaatgg

SEQ ID NO: 3826 - DNA, 23 bp, Homo sapiens
tcaagccaaaaattataaatagg

SEQ ID NO: 3827 - DNA, 23 bp, Homo sapiens
ttattaatgtatatgtatatagg

SEQ ID NO: 3828 - DNA, 23 bp, Homo sapiens
agacagagagtagctccttttgg

SEQ ID NO: 3829 - DNA, 23 bp, Homo sapiens
agaactttaggcagaattaaagg

SEQ ID NO: 3830 - DNA, 23 bp, Homo sapiens
cttaattcagaaatatatttcgg

SEQ ID NO: 3831 - DNA, 23 bp, Homo sapiens
ttatcaatgccattagttactgg

SEQ ID NO: 3832 - DNA, 23 bp, Homo sapiens
gatgctgccatatatgtaattgg

SEQ ID NO: 3833 - DNA, 23 bp, Homo sapiens
acaaaaggatagttagtaaaagg

SEQ ID NO: 3834 - DNA, 23 bp, Homo sapiens
ttactcatgtacagagtaaaagg

SEQ ID NO: 3835 - DNA, 23 bp, Homo sapiens
gctaaagaacaatatataaatgg

SEQ ID NO: 3836 - DNA, 23 bp, Homo sapiens
ttataaggcatatatttcttagg

SEQ ID NO: 3837 - DNA, 23 bp, Homo sapiens
gatattgctgagaaaagttttgg

SEQ ID NO: 3838 - DNA, 23 bp, Homo sapiens
ccttgaatttatgcactaaatgg

SEQ ID NO: 3839 - DNA, 23 bp, Homo sapiens
tttggcctgtatatacatattgg

SEQ ID NO: 3840 - DNA, 23 bp, Homo sapiens
gccaagtctacagttctttaggg

SEQ ID NO: 3841 - DNA, 23 bp, Homo sapiens
ctctgttgtggtttgcttcaggg

SEQ ID NO: 3842 - DNA, 23 bp, Homo sapiens
tggctcttataataggttattgg

SEQ ID NO: 3843 - DNA, 23 bp, Homo sapiens
ctaaattttctggccaaataggg

SEQ ID NO: 3844 - DNA, 23 bp, Homo sapiens
ccagttttcaaaaacattgatgg

SEQ ID NO: 3845 - DNA, 23 bp, Homo sapiens
aggtaagtaagacagattttagg

SEQ ID NO: 3846 - DNA, 23 bp, Homo sapiens
cttctagcgcttgtcatataggg

SEQ ID NO: 3847 - DNA, 23 bp, Homo sapiens
atatgctgtattatatttacagg

SEQ ID NO: 3848 - DNA, 23 bp, Homo sapiens
gcattgtgcatttaaacttttgg

SEQ ID NO: 3849 - DNA, 23 bp, Homo sapiens
tgagagtcagagcctgttaatgg

SEQ ID NO: 3850 - DNA, 23 bp, Homo sapiens
ataaaaataactttattagaagg

SEQ ID NO: 3851 - DNA, 23 bp, Homo sapiens
tgtccaagtcagaaactctttgg

SEQ ID NO: 3852 - DNA, 23 bp, Homo sapiens
tttcactctaccaaataaaaagg

SEQ ID NO: 3853 - DNA, 23 bp, Homo sapiens
gccaagtgtcttccgctaaaagg

SEQ ID NO: 3854 - DNA, 23 bp, Homo sapiens
tcatattagcattcacttagagg

SEQ ID NO: 3855 - DNA, 23 bp, Homo sapiens
ggctgtccttgctaattaatggg

SEQ ID NO: 3856 - DNA, 23 bp, Homo sapiens
gataattcagtgattgtatacgg

SEQ ID NO: 3857 - DNA, 23 bp, Homo sapiens
ttagacaagcacaacttattagg

SEQ ID NO: 3858 - DNA, 23 bp, Homo sapiens
atactcagatggacaagttttgg

SEQ ID NO: 3859 - DNA, 23 bp, Homo sapiens
tatttatcacacatgcaaaaagg

SEQ ID NO: 3860 - DNA, 23 bp, Homo sapiens
ctatgggcttcctttctaaaagg

SEQ ID NO: 3861 - DNA, 23 bp, Homo sapiens
ttatactgacgtttattatcagg

SEQ ID NO: 3862 - DNA, 23 bp, Homo sapiens
gattgtacctttagacttatggg

SEQ ID NO: 3863 - DNA, 23 bp, Homo sapiens
atagaaattatcccttaaaatgg

SEQ ID NO: 3864 - DNA, 23 bp, Homo sapiens
tctttctctttcttgttcattgg

SEQ ID NO: 3865 - DNA, 23 bp, Homo sapiens
agatgtatacttaagatatatgg

SEQ ID NO: 3866 - DNA, 23 bp, Homo sapiens
tatgtatttttttatttaaaggg

SEQ ID NO: 3867 - DNA, 23 bp, Homo sapiens
tggactctgaaaacaaaaatagg

SEQ ID NO: 3868 - DNA, 23 bp, Homo sapiens
gcatgagcatggacagtatttgg

SEQ ID NO: 3869 - DNA, 23 bp, Homo sapiens
cgtttggaatgaccataaaatgg

SEQ ID NO: 3870 - DNA, 23 bp, Homo sapiens
atatgtactacgttttttactgg

SEQ ID NO: 3871 - DNA, 23 bp, Homo sapiens
aatctcatacactagaaaaatgg

SEQ ID NO: 3872 - DNA, 23 bp, Homo sapiens
cctcctgtaacgtcaattctagg

SEQ ID NO: 3873 - DNA, 23 bp, Homo sapiens
tagcatgcttaaagctttagagg

SEQ ID NO: 3874 - DNA, 23 bp, Homo sapiens
acttaatgtacagattttatagg

SEQ ID NO: 3875 - DNA, 23 bp, Homo sapiens
tgttatataaaaccaaataatgg

SEQ ID NO: 3876 - DNA, 23 bp, Homo sapiens
ctacttttcatgactctatctgg

SEQ ID NO: 3877 - DNA, 23 bp, Homo sapiens
ttgagaaacacaactctaaaagg

SEQ ID NO: 3878 - DNA, 23 bp, Homo sapiens
catggaatcaggactataaaagg

SEQ ID NO: 3879 - DNA, 23 bp, Homo sapiens
gtaggaatactggcctttactgg

SEQ ID NO: 3880 - DNA, 23 bp, Homo sapiens
ggtaaattcagcaagattaatgg

SEQ ID NO: 3881 - DNA, 23 bp, Homo sapiens
cttctatgcttcatttttgatgg

SEQ ID NO: 3882 - DNA, 23 bp, Homo sapiens
aaattcccattggagaaaaatgg

SEQ ID NO: 3883 - DNA, 23 bp, Homo sapiens
tctggcctgtgggccataattgg

SEQ ID NO: 3884 - DNA, 23 bp, Homo sapiens
tccccactagcctcaccatttgg

SEQ ID NO: 3885 - DNA, 23 bp, Homo sapiens
gtccttttctaaaaaaaataagg

SEQ ID NO: 3886 - DNA, 23 bp, Homo sapiens
ctaattttatggtcaataattgg

SEQ ID NO: 3887 - DNA, 23 bp, Homo sapiens
attttgaaccaaattataaatgg

SEQ ID NO: 3888 - DNA, 23 bp, Homo sapiens
tttatacacaggaataaaaaagg

SEQ ID NO: 3889 - DNA, 23 bp, Homo sapiens
gttaaacacttattattaaatgg

SEQ ID NO: 3890 - DNA, 23 bp, Homo sapiens
tgaatggctttccagccttctgg

SEQ ID NO: 3891 - DNA, 23 bp, Homo sapiens
ctttctgtccaatttataaaagg

SEQ ID NO: 3892 - DNA, 23 bp, Homo sapiens
tttaaacttacccctcaaaatgg

SEQ ID NO: 3893 - DNA, 23 bp, Homo sapiens
aatttattggatttaatattggg

SEQ ID NO: 3894 - DNA, 23 bp, Homo sapiens
tgtgctttactattttctttagg

SEQ ID NO: 3895 - DNA, 23 bp, Homo sapiens
agtagtgttgtgtaagtaaatgg

SEQ ID NO: 3896 - DNA, 23 bp, Homo sapiens
ctttatcgaaccttgttaattgg

SEQ ID NO: 3897 - DNA, 23 bp, Homo sapiens
ttgcatctcctttttcagtatgg

SEQ ID NO: 3898 - DNA, 23 bp, Homo sapiens
catcatttaccaatattttaggg

SEQ ID NO: 3899 - DNA, 23 bp, Homo sapiens
ttgtgactctgattatcttatgg

SEQ ID NO: 3900 - DNA, 23 bp, Homo sapiens
ccattcttcagcatttttactgg

SEQ ID NO: 3901 - DNA, 23 bp, Homo sapiens
ttaatatctaacctgtttacagg

SEQ ID NO: 3902 - DNA, 23 bp, Homo sapiens
tgagttatcgttctgttcttagg

SEQ ID NO: 3903 - DNA, 23 bp, Homo sapiens
tctgtgacagttattaaaaatgg

SEQ ID NO: 3904 - DNA, 23 bp, Homo sapiens
ccagttacaggcccttttatggg

SEQ ID NO: 3905 - DNA, 23 bp, Homo sapiens
gagatgatcgatctatgttttgg

SEQ ID NO: 3906 - DNA, 23 bp, Homo sapiens
tcagccctctaccctaaataagg

SEQ ID NO: 3907 - DNA, 23 bp, Homo sapiens
gagatctctcagaaaaaaattgg

SEQ ID NO: 3908 - DNA, 23 bp, Homo sapiens
gcaataatttagattgaaaaagg

SEQ ID NO: 3909 - DNA, 23 bp, Homo sapiens
ttaaagattccctaaaatattgg

SEQ ID NO: 3910 - DNA, 23 bp, Homo sapiens
tattgcggcaactttctaaaagg

SEQ ID NO: 3911 - DNA, 23 bp, Homo sapiens
tcacacaagtaaaattttatagg

SEQ ID NO: 3912 - DNA, 23 bp, Homo sapiens
ccagaccctcctcttctaaaagg

SEQ ID NO: 3913 - DNA, 23 bp, Homo sapiens
catataggagacgtaatatatgg

SEQ ID NO: 3914 - DNA, 23 bp, Homo sapiens
ataaaacccattaaaattttggg

SEQ ID NO: 3915 - DNA, 23 bp, Homo sapiens
ataaagatgtaagtagaatatgg

SEQ ID NO: 3916 - DNA, 23 bp, Homo sapiens
ccttggacttgcttctaatatgg

SEQ ID NO: 3917 - DNA, 23 bp, Homo sapiens
tataaaacaaacatattaaaagg

SEQ ID NO: 3918 - DNA, 23 bp, Homo sapiens
atatcaatataaaagttaattgg

SEQ ID NO: 3919 - DNA, 23 bp, Homo sapiens
ccacaatcaggacagtaatttgg

SEQ ID NO: 3920 - DNA, 23 bp, Homo sapiens
tcttaagagcacatacttatagg

SEQ ID NO: 3921 - DNA, 23 bp, Homo sapiens
gcatgaccatgcaaactttcagg

SEQ ID NO: 3922 - DNA, 23 bp, Homo sapiens
gtagatggcttaatgggttttgg

SEQ ID NO: 3923 - DNA, 23 bp, Homo sapiens
ttcagtctcttgagatttacagg

SEQ ID NO: 3924 - DNA, 23 bp, Homo sapiens
tttatgctccattagcaaattgg

SEQ ID NO: 3925 - DNA, 23 bp, Homo sapiens
cacacaagtgaaaattaaattgg

SEQ ID NO: 3926 - DNA, 23 bp, Homo sapiens
ctttgagagcaaacaaaaattgg

SEQ ID NO: 3927 - DNA, 23 bp, Homo sapiens
acatagagcttcatacttactgg

SEQ ID NO: 3928 - DNA, 23 bp, Homo sapiens
gcaactgctaccacagttaaagg

SEQ ID NO: 3929 - DNA, 23 bp, Homo sapiens
gtattacattcattgataaatgg

SEQ ID NO: 3930 - DNA, 23 bp, Homo sapiens
aagtgtcacttgaaataaaaagg

SEQ ID NO: 3931 - DNA, 23 bp, Homo sapiens
ctttttttcctttctgtaaaggg

SEQ ID NO: 3932 - DNA, 23 bp, Homo sapiens
gcaaaaatctgtatgcattaagg

SEQ ID NO: 3933 - DNA, 23 bp, Homo sapiens
gaaaaccaagagcttattaaagg

SEQ ID NO: 3934 - DNA, 23 bp, Homo sapiens
ttttcaggctcttcataaatagg

SEQ ID NO: 3935 - DNA, 23 bp, Homo sapiens
tctaatctgcattaaataaaagg

SEQ ID NO: 3936 - DNA, 23 bp, Homo sapiens
tacatactgcaaataataattgg

SEQ ID NO: 3937 - DNA, 23 bp, Homo sapiens
tcttccttgagtccagttaaagg

SEQ ID NO: 3938 - DNA, 23 bp, Homo sapiens
ggaaaaagctgggagttaattgg

SEQ ID NO: 3939 - DNA, 23 bp, Homo sapiens
tgttctacgtatttcaaaaatgg

SEQ ID NO: 3940 - DNA, 23 bp, Homo sapiens
tggtgtcaagatattaaaattgg

SEQ ID NO: 3941 - DNA, 23 bp, Homo sapiens
ttatgccactggattaaaaaagg

SEQ ID NO: 3942 - DNA, 23 bp, Homo sapiens
gatttagtattgtaaaaaaatgg

SEQ ID NO: 3943 - DNA, 23 bp, Homo sapiens
tttgaatgcaaaacacttagagg

SEQ ID NO: 3944 - DNA, 23 bp, Homo sapiens
tctctagtacttaagtagtatgg

SEQ ID NO: 3945 - DNA, 23 bp, Homo sapiens
ctccctgccatagttttaaatgg

SEQ ID NO: 3946 - DNA, 23 bp, Homo sapiens
aatcccttagtataaatctttgg

SEQ ID NO: 3947 - DNA, 23 bp, Homo sapiens
tttggtgacacaagtaaaaatgg

SEQ ID NO: 3948 - DNA, 23 bp, Homo sapiens
gtattttgcaacagtataatagg

SEQ ID NO: 3949 - DNA, 23 bp, Homo sapiens
gtttgggcttttgtgttaattgg

SEQ ID NO: 3950 - DNA, 23 bp, Homo sapiens
ctagggctagggcaattaattgg

SEQ ID NO: 3951 - DNA, 23 bp, Homo sapiens
gctcggctatttttaggtttggg

SEQ ID NO: 3952 - DNA, 23 bp, Homo sapiens
gtatttatatttgtcttctatgg

SEQ ID NO: 3953 - DNA, 23 bp, Homo sapiens
gcagagaacaacaattttaatgg

SEQ ID NO: 3954 - DNA, 23 bp, Homo sapiens
tgatggatgttcttgtttattgg

SEQ ID NO: 3955 - DNA, 23 bp, Homo sapiens
tgtcatttctagtacttaattgg

SEQ ID NO: 3956 - DNA, 23 bp, Homo sapiens
gttacagcaatgggtcttaatgg

SEQ ID NO: 3957 - DNA, 23 bp, Homo sapiens
tggaattcatgtattataaaagg

SEQ ID NO: 3958 - DNA, 23 bp, Homo sapiens
attaccatttcaactctaaatgg

SEQ ID NO: 3959 - DNA, 23 bp, Homo sapiens
gcaaaacgagtgccaatatttgg

SEQ ID NO: 3960 - DNA, 23 bp, Homo sapiens
attgacttcaatctttaatatgg

SEQ ID NO: 3961 - DNA, 23 bp, Homo sapiens
acaaggagaaccaaattatttgg

SEQ ID NO: 3962 - DNA, 23 bp, Homo sapiens
gcactagaggttactataaatgg

SEQ ID NO: 3963 - DNA, 23 bp, Homo sapiens
tcacattcccttgtaaaaaaagg

SEQ ID NO: 3964 - DNA, 23 bp, Homo sapiens
agtcagtgctccttatttaaagg

SEQ ID NO: 3965 - DNA, 23 bp, Homo sapiens
tcacaatcccactttttctttgg

SEQ ID NO: 3966 - DNA, 23 bp, Homo sapiens
tcataagctaattattaaattgg

SEQ ID NO: 3967 - DNA, 23 bp, Homo sapiens
tcatttcaatccacaaaaatagg

SEQ ID NO: 3968 - DNA, 23 bp, Homo sapiens
atatacacacaagaaattttagg

SEQ ID NO: 3969 - DNA, 23 bp, Homo sapiens
gattgcttcttgcctgaaattgg

SEQ ID NO: 3970 - DNA, 23 bp, Homo sapiens
gcagtactcaacaaagtaattgg

SEQ ID NO: 3971 - DNA, 23 bp, Homo sapiens
aggctgtccttgctaattaatgg

SEQ ID NO: 3972 - DNA, 23 bp, Homo sapiens
ggttatgtatattataaattagg

SEQ ID NO: 3973 - DNA, 23 bp, Homo sapiens
gccgtcctcttaccaatttcagg

SEQ ID NO: 3974 - DNA, 23 bp, Homo sapiens
tggcatacggagatcaaaattgg

SEQ ID NO: 3975 - DNA, 23 bp, Homo sapiens
ataacttgtttggtgaaaaatgg

SEQ ID NO: 3976 - DNA, 23 bp, Homo sapiens
tttcaattcatgccaattatagg

SEQ ID NO: 3977 - DNA, 23 bp, Homo sapiens
ctaactccagtttatcatttagg

SEQ ID NO: 3978 - DNA, 23 bp, Homo sapiens
tatctgactctaaataaatttgg

SEQ ID NO: 3979 - DNA, 23 bp, Homo sapiens
gcagagacttcaattttttatgg

SEQ ID NO: 3980 - DNA, 23 bp, Homo sapiens
aatcaaagataacaccacagggg

SEQ ID NO: 3981 - DNA, 23 bp, Homo sapiens
aagatggtagatgaatgcaatgg

SEQ ID NO: 3982 - DNA, 23 bp, Homo sapiens
gtatgaagcagaaaccacgaagg

SEQ ID NO: 3983 - DNA, 23 bp, Homo sapiens
tatagtatgtcctaccacggggg

SEQ ID NO: 3984 - DNA, 23 bp, Homo sapiens
atagagatcagaaagcccagtgg

SEQ ID NO: 3985 - DNA, 23 bp, Homo sapiens
agggtactagtgtaagacagggg

SEQ ID NO: 3986 - DNA, 23 bp, Homo sapiens
aagtggagaaaagttcagagggg

SEQ ID NO: 3987 - DNA, 23 bp, Homo sapiens
tcaaagattcaacaacactgtgg

SEQ ID NO: 3988 - DNA, 23 bp, Homo sapiens
ggggcatcagaaacacacaatgg

SEQ ID NO: 3989 - DNA, 23 bp, Homo sapiens
gaagttaagagcaagcactgagg

SEQ ID NO: 3990 - DNA, 23 bp, Homo sapiens
gtaacatgtacccaacaatgtgg

SEQ ID NO: 3991 - DNA, 23 bp, Homo sapiens
acactgagagtggaacacaaagg

SEQ ID NO: 3992 - DNA, 23 bp, Homo sapiens
atatgctttggaaaacacggggg

SEQ ID NO: 3993 - DNA, 23 bp, Homo sapiens
aggcatgggaagtaacacgtagg

SEQ ID NO: 3994 - DNA, 23 bp, Homo sapiens
ttcactgtgtgtgatccatgggg

SEQ ID NO: 3995 - DNA, 23 bp, Homo sapiens
atctccctaagcatacagggtgg

SEQ ID NO: 3996 - DNA, 23 bp, Homo sapiens
ggtgaatgcagatggtacagagg

SEQ ID NO: 3997 - DNA, 23 bp, Homo sapiens
ggttagccctcaaggcaacgtgg

SEQ ID NO: 3998 - DNA, 23 bp, Homo sapiens
tgaatgggaaaccatcagagagg

SEQ ID NO: 3999 - DNA, 23 bp, Homo sapiens
tttgtcatagagtatacacgagg

SEQ ID NO: 4000 - DNA, 23 bp, Homo sapiens
atgacaaagtaaaatcacagtgg

SEQ ID NO: 4001 - DNA, 23 bp, Homo sapiens
tgtacggtcaagaaacatggtgg

SEQ ID NO: 4002 - DNA, 23 bp, Homo sapiens
tagatattactcactcagggagg

SEQ ID NO: 4003 - DNA, 23 bp, Homo sapiens
attggagactgtattcaccacgg

SEQ ID NO: 4004 - DNA, 23 bp, Homo sapiens
aaggggttgagggaaagccgagg

SEQ ID NO: 4005 - DNA, 23 bp, Homo sapiens
gtaaaggggataataccctgagg

SEQ ID NO: 4006 - DNA, 23 bp, Homo sapiens
tatcatgagaaagacatgtgcgg

SEQ ID NO: 4007 - DNA, 23 bp, Homo sapiens
cacccttaagtgaagcacagagg

SEQ ID NO: 4008 - DNA, 23 bp, Homo sapiens
acagtggtttccctgcatggagg

SEQ ID NO: 4009 - DNA, 23 bp, Homo sapiens
gcaaacccactcctacacgaagg

SEQ ID NO: 4010 - DNA, 23 bp, Homo sapiens
atatagtatgtcctaccacgggg

SEQ ID NO: 4011 - DNA, 23 bp, Homo sapiens
ggagaagtgaagaaacatggagg

SEQ ID NO: 4012 - DNA, 23 bp, Homo sapiens
actgaacaaagcactcccgtagg

SEQ ID NO: 4013 - DNA, 23 bp, Homo sapiens
tgaaatgtctccattcaatgtgg

SEQ ID NO: 4014 - DNA, 23 bp, Homo sapiens
tggtattgctagtagaacggtgg

SEQ ID NO: 4015 - DNA, 23 bp, Homo sapiens
gatatgggagttaagattcgggg

SEQ ID NO: 4016 - DNA, 23 bp, Homo sapiens
tttgactgaatagaaagtggtgg

SEQ ID NO: 4017 - DNA, 23 bp, Homo sapiens
cctatgagaagcaggcagggggg

SEQ ID NO: 4018 - DNA, 23 bp, Homo sapiens
accacaacagagaaggttggggg

SEQ ID NO: 4019 - DNA, 23 bp, Homo sapiens
tcttctgtcaaaagtcacagagg

SEQ ID NO: 4020 - DNA, 23 bp, Homo sapiens
atgatggtgaaactggcggtggg

SEQ ID NO: 4021 - DNA, 23 bp, Homo sapiens
ttagagatattgtacccctgtgg

SEQ ID NO: 4022 - DNA, 23 bp, Homo sapiens
catgtacatacagttctacgagg

SEQ ID NO: 4023 - DNA, 23 bp, Homo sapiens
tgcctgtgtgtatgtgaacgagg

SEQ ID NO: 4024 - DNA, 23 bp, Homo sapiens
aagatagcctcgcagcacagtgg

SEQ ID NO: 4025 - DNA, 23 bp, Homo sapiens
atgaatgatggtgaaactggcgg

SEQ ID NO: 4026 - DNA, 23 bp, Homo sapiens
aaggaaatataagcccaacacgg

SEQ ID NO: 4027 - DNA, 23 bp, Homo sapiens
gaattgcacacacacacacgcgg

SEQ ID NO: 4028 - DNA, 23 bp, Homo sapiens
ggacgcgtcagtaaaactggtgg

SEQ ID NO: 4029 - DNA, 23 bp, Homo sapiens
tctctgttatgagtccacaaagg

SEQ ID NO: 4030 - DNA, 23 bp, Homo sapiens
ggggccacttttaaactaggggg

SEQ ID NO: 4031 - DNA, 23 bp, Homo sapiens
aatttattgaaccctcaaagggg

SEQ ID NO: 4032 - DNA, 23 bp, Homo sapiens
ataaaacattcaatcccacatgg

SEQ ID NO: 4033 - DNA, 23 bp, Homo sapiens
ctgcaacatcaaaaacagagagg

SEQ ID NO: 4034 - DNA, 23 bp, Homo sapiens
tcccttgtccaagagccctgtgg

SEQ ID NO: 4035 - DNA, 23 bp, Homo sapiens
gaacttggtaaagaccaagaggg

SEQ ID NO: 4036 - DNA, 23 bp, Homo sapiens
aattctaaatgataaccacaggg

SEQ ID NO: 4037 - DNA, 23 bp, Homo sapiens
aaaagatgatggaatccctgagg

SEQ ID NO: 4038 - DNA, 23 bp, Homo sapiens
agatacactcggaattagtgggg

SEQ ID NO: 4039 - DNA, 23 bp, Homo sapiens
atgtaactaagcatttagagggg

SEQ ID NO: 4040 - DNA, 23 bp, Homo sapiens
ataaagatactaagccctcgggg

SEQ ID NO: 4041 - DNA, 23 bp, Homo sapiens
gtggtgatagttctaaaacaggg

SEQ ID NO: 4042 - DNA, 23 bp, Homo sapiens
atcactattaaagaagacgacgg

SEQ ID NO: 4043 - DNA, 23 bp, Homo sapiens
attaggtataattatcactgtgg

SEQ ID NO: 4044 - DNA, 23 bp, Homo sapiens
tcttacataatgttcaaacaggg

SEQ ID NO: 4045 - DNA, 23 bp, Homo sapiens
gtgatagcctttggtcaacgggg

SEQ ID NO: 4046 - DNA, 23 bp, Homo sapiens
tgtatgcgtatgtccaacagagg

SEQ ID NO: 4047 - DNA, 23 bp, Homo sapiens
aagtggggtcaagagcctgtggg

SEQ ID NO: 4048 - DNA, 23 bp, Homo sapiens
atacataaaacggaaaactgagg

SEQ ID NO: 4049 - DNA, 23 bp, Homo sapiens
ctgtgtgtatgtgaacgaggagg

SEQ ID NO: 4050 - DNA, 23 bp, Homo sapiens
tgcctcctattataccctagggg

SEQ ID NO: 4051 - DNA, 23 bp, Homo sapiens
atagtggtgtcagatgagaaggg

SEQ ID NO: 4052 - DNA, 23 bp, Homo sapiens
atagcagccagacaaaacagagg

SEQ ID NO: 4053 - DNA, 23 bp, Homo sapiens
tctatctctttaggaccaggggg

SEQ ID NO: 4054 - DNA, 23 bp, Homo sapiens
tgtattctgtaattgctaggggg

SEQ ID NO: 4055 - DNA, 23 bp, Homo sapiens
ctcatgtacctggaaatgagtgg

SEQ ID NO: 4056 - DNA, 23 bp, Homo sapiens
gtagaaacagaagaaaaactggg

SEQ ID NO: 4057 - DNA, 23 bp, Homo sapiens
ataggctgaaagctccaacaggg

SEQ ID NO: 4058 - DNA, 23 bp, Homo sapiens
tttgaggtacaacagaccgaagg

SEQ ID NO: 4059 - DNA, 23 bp, Homo sapiens
gctaatgataatctagacagagg

SEQ ID NO: 4060 - DNA, 23 bp, Homo sapiens
tgagcagaaactgtatacagagg

SEQ ID NO: 4061 - DNA, 23 bp, Homo sapiens
tgtcttgctatgaaacctagagg

SEQ ID NO: 4062 - DNA, 23 bp, Homo sapiens
aatgtgacagatatcacatgagg

SEQ ID NO: 4063 - DNA, 23 bp, Homo sapiens
tagacgaatggaggtacacgagg

SEQ ID NO: 4064 - DNA, 23 bp, Homo sapiens
aaaatgaacacagactgcagagg

SEQ ID NO: 4065 - DNA, 23 bp, Homo sapiens
agtgaagactcaataacaggtgg

SEQ ID NO: 4066 - DNA, 23 bp, Homo sapiens
gaataggtacagattcagagtgg

SEQ ID NO: 4067 - DNA, 23 bp, Homo sapiens
gaggaaataagaaattcaagcgg

SEQ ID NO: 4068 - DNA, 23 bp, Homo sapiens
aagccattaaaacccctcagagg

SEQ ID NO: 4069 - DNA, 23 bp, Homo sapiens
aagtcagaaacacatgtgtgtgg

SEQ ID NO: 4070 - DNA, 23 bp, Homo sapiens
acagaaagttggaaccaaagggg

SEQ ID NO: 4071 - DNA, 23 bp, Homo sapiens
ggaatgcataaacacatgggagg

SEQ ID NO: 4072 - DNA, 23 bp, Homo sapiens
gtttggtaaatgcatcaccaagg

SEQ ID NO: 4073 - DNA, 23 bp, Homo sapiens
aatatgctttggaaaacacgggg

SEQ ID NO: 4074 - DNA, 23 bp, Homo sapiens
gatgggaaccagtctctaggtgg

SEQ ID NO: 4075 - DNA, 23 bp, Homo sapiens
tatcaccacaggcttcccagcgg

SEQ ID NO: 4076 - DNA, 23 bp, Homo sapiens
agagaaatgcttcctcagtgagg

SEQ ID NO: 4077 - DNA, 23 bp, Homo sapiens
ctactgttaagacacaggatggg

SEQ ID NO: 4078 - DNA, 23 bp, Homo sapiens
catggttttcatgaactgggcgg

SEQ ID NO: 4079 - DNA, 23 bp, Homo sapiens
taaacatcagaagacctcaaggg

SEQ ID NO: 4080 - DNA, 23 bp, Homo sapiens
attcataagatcaatgactgtgg

SEQ ID NO: 4081 - DNA, 23 bp, Homo sapiens
gttcaataaattcctcagtgggg

SEQ ID NO: 4082 - DNA, 23 bp, Homo sapiens
gagagaccgcaagatcaggaggg

SEQ ID NO: 4083 - DNA, 23 bp, Homo sapiens
tatgggatcaaagcatccagagg

SEQ ID NO: 4084 - DNA, 23 bp, Homo sapiens
gtttccgtactcccctagtgggg

SEQ ID NO: 4085 - DNA, 23 bp, Homo sapiens
tatagattagaaaaaaatcgggg

SEQ ID NO: 4086 - DNA, 23 bp, Homo sapiens
aaatataccgaattgctctgagg

SEQ ID NO: 4087 - DNA, 23 bp, Homo sapiens
gcaagaggaagaacacgttgagg

SEQ ID NO: 4088 - DNA, 23 bp, Homo sapiens
taatctcagaaatgccacaacgg

SEQ ID NO: 4089 - DNA, 23 bp, Homo sapiens
gtttattttctctttctgcgagg

SEQ ID NO: 4090 - DNA, 23 bp, Homo sapiens
gggtgggaaaggtttcagaaagg

SEQ ID NO: 4091 - DNA, 23 bp, Homo sapiens
gccttgggaaatgaataggtggg

SEQ ID NO: 4092 - DNA, 23 bp, Homo sapiens
agaggaatgcataaacacatggg

SEQ ID NO: 4093 - DNA, 23 bp, Homo sapiens
tgtgtgtgtacatatatgggtgg

SEQ ID NO: 4094 - DNA, 23 bp, Homo sapiens
gcagggaacaatgatacctgcgg

SEQ ID NO: 4095 - DNA, 23 bp, Homo sapiens
ctatgaaaacatgcactgggtgg

SEQ ID NO: 4096 - DNA, 23 bp, Homo sapiens
ggtaggaatgcatttcccagagg

SEQ ID NO: 4097 - DNA, 23 bp, Homo sapiens
ggataaacattagctctgtgtgg

SEQ ID NO: 4098 - DNA, 23 bp, Homo sapiens
gcacagttgagactacaccttgg

SEQ ID NO: 4099 - DNA, 23 bp, Homo sapiens
agattaagagaaaaaaaacacgg

SEQ ID NO: 4100 - DNA, 23 bp, Homo sapiens
aaatgctcgcttactcacagagg

SEQ ID NO: 4101 - DNA, 23 bp, Homo sapiens
agcgttctctatctccacaaagg

SEQ ID NO: 4102 - DNA, 23 bp, Homo sapiens
ctcctcgttcacatacacacagg

SEQ ID NO: 4103 - DNA, 23 bp, Homo sapiens
tctagatagtatttccgtggggg

SEQ ID NO: 4104 - DNA, 23 bp, Homo sapiens
ttgttactgacttatctgagagg

SEQ ID NO: 4105 - DNA, 23 bp, Homo sapiens
tatcaaggtctcgatcgagaggg

SEQ ID NO: 4106 - DNA, 23 bp, Homo sapiens
tcatacagaaaggactcaggagg

SEQ ID NO: 4107 - DNA, 23 bp, Homo sapiens
ccaagcaaagcaccaaacagtgg

SEQ ID NO: 4108 - DNA, 23 bp, Homo sapiens
gcaaaatgtcttaacactagggg

SEQ ID NO: 4109 - DNA, 23 bp, Homo sapiens
caactaagatagacacaaagggg

SEQ ID NO: 4110 - DNA, 23 bp, Homo sapiens
tttgcatgaagcattagtggtgg

SEQ ID NO: 4111 - DNA, 23 bp, Homo sapiens
gaactgttggtgaagcagagagg

SEQ ID NO: 4112 - DNA, 23 bp, Homo sapiens
tcatagaaaaggattcaggaggg

SEQ ID NO: 4113 - DNA, 23 bp, Homo sapiens
gtaatgttatgaaagaaaggggg

SEQ ID NO: 4114 - DNA, 23 bp, Homo sapiens
ttacacataaatatgaacgatgg

SEQ ID NO: 4115 - DNA, 23 bp, Homo sapiens
gctgggaattacctcatgagggg

SEQ ID NO: 4116 - DNA, 23 bp, Homo sapiens
tgagttctgtggcctcactgagg

SEQ ID NO: 4117 - DNA, 23 bp, Homo sapiens
aatctacctaaaattcacagagg

SEQ ID NO: 4118 - DNA, 23 bp, Homo sapiens
agttgctgtggaaaaaccagagg

SEQ ID NO: 4119 - DNA, 23 bp, Homo sapiens
caaatttaatcacctctgagggg

SEQ ID NO: 4120 - DNA, 23 bp, Homo sapiens
atatgcatcactcaataccatgg

SEQ ID NO: 4121 - DNA, 23 bp, Homo sapiens
aaaacagttagatggtaccaggg

SEQ ID NO: 4122 - DNA, 23 bp, Homo sapiens
tctcctggtagcaaacaatgagg

SEQ ID NO: 4123 - DNA, 23 bp, Homo sapiens
caataagtaatacagtatagggg

SEQ ID NO: 4124 - DNA, 23 bp, Homo sapiens
tgcacaccagctatacacacagg

SEQ ID NO: 4125 - DNA, 23 bp, Homo sapiens
gtgacttcatgataaaaaggggg

SEQ ID NO: 4126 - DNA, 23 bp, Homo sapiens
cagaataagaaagcactaggggg

SEQ ID NO: 4127 - DNA, 23 bp, Homo sapiens
tagtgtttgattgaggacggagg

SEQ ID NO: 4128 - DNA, 23 bp, Homo sapiens
ttatctttagaaatgactggggg

SEQ ID NO: 4129 - DNA, 23 bp, Homo sapiens
gagtgtgttcctgagaggagggg

SEQ ID NO: 4130 - DNA, 23 bp, Homo sapiens
tctagatttggagagacaagggg

SEQ ID NO: 4131 - DNA, 23 bp, Homo sapiens
gtaaacaggcaaagtcacaaagg

SEQ ID NO: 4132 - DNA, 23 bp, Homo sapiens
tgaagtgcctgggtactgggtgg

SEQ ID NO: 4133 - DNA, 23 bp, Homo sapiens
atattaagaacagatacactcgg

SEQ ID NO: 4134 - DNA, 23 bp, Homo sapiens
gtcctttagaaatttctctgagg

SEQ ID NO: 4135 - DNA, 23 bp, Homo sapiens
gatactcctcattacccccacgg

SEQ ID NO: 4136 - DNA, 23 bp, Homo sapiens
atcactaccactgtgctgcgagg

SEQ ID NO: 4137 - DNA, 23 bp, Homo sapiens
agggtgaaggaaccgtttggggg

SEQ ID NO: 4138 - DNA, 23 bp, Homo sapiens
cacagggaactggcaccacgggg

SEQ ID NO: 4139 - DNA, 23 bp, Homo sapiens
atgtggcagtttaatgacagagg

SEQ ID NO: 4140 - DNA, 23 bp, Homo sapiens
accaaggatgacttcccagtagg

SEQ ID NO: 4141 - DNA, 23 bp, Homo sapiens
gttatagcagtgtaggctggagg

SEQ ID NO: 4142 - DNA, 23 bp, Homo sapiens
tatggaatagctgagactgaggg

SEQ ID NO: 4143 - DNA, 23 bp, Homo sapiens
ttatgtgtagatacacagactgg

SEQ ID NO: 4144 - DNA, 23 bp, Homo sapiens
atgcccgggtacttcaagcaggg

SEQ ID NO: 4145 - DNA, 23 bp, Homo sapiens
gggttcaataaattcctcagtgg

SEQ ID NO: 4146 - DNA, 23 bp, Homo sapiens
tgagtgataaacatcctgcaggg

SEQ ID NO: 4147 - DNA, 23 bp, Homo sapiens
tgaggtcgaagcttacggcaagg

SEQ ID NO: 4148 - DNA, 23 bp, Homo sapiens
atttgctgtgataaacagtgggg

SEQ ID NO: 4149 - DNA, 23 bp, Homo sapiens
aaaacttaaaaagcacctagagg

SEQ ID NO: 4150 - DNA, 23 bp, Homo sapiens
tgactacaaaaggtatcaggagg

SEQ ID NO: 4151 - DNA, 23 bp, Homo sapiens
taagtcacatccagaaatcgggg

SEQ ID NO: 4152 - DNA, 23 bp, Homo sapiens
agacaaagagtaaattactgagg

SEQ ID NO: 4153 - DNA, 23 bp, Homo sapiens
atctagatagtatttccgtgggg

SEQ ID NO: 4154 - DNA, 23 bp, Homo sapiens
ctactgggaaggtatgcctgtgg

SEQ ID NO: 4155 - DNA, 23 bp, Homo sapiens
agagaaggaggataactaggagg

SEQ ID NO: 4156 - DNA, 23 bp, Homo sapiens
agagtcccggtagaaactggagg

SEQ ID NO: 4157 - DNA, 23 bp, Homo sapiens
tggaggtaaccaaaatggagagg

SEQ ID NO: 4158 - DNA, 23 bp, Homo sapiens
aagggtactagtgtaagacaggg

SEQ ID NO: 4159 - DNA, 23 bp, Homo sapiens
gcattttgtgcaatgctgagggg

SEQ ID NO: 4160 - DNA, 23 bp, Homo sapiens
agaaatgaacaagtatccagagg

SEQ ID NO: 4161 - DNA, 23 bp, Homo sapiens
aggcaatacaagaaaccttgagg

SEQ ID NO: 4162 - DNA, 23 bp, Homo sapiens
aaggactcaaacttttcgcgggg

SEQ ID NO: 4163 - DNA, 23 bp, Homo sapiens
gtgagagtaattgaatgctgagg

SEQ ID NO: 4164 - DNA, 23 bp, Homo sapiens
ggagctttaagagcactttgggg

SEQ ID NO: 4165 - DNA, 23 bp, Homo sapiens
gtaaaaaaaaatgtcaaacaagg

SEQ ID NO: 4166 - DNA, 23 bp, Homo sapiens
acagtgccaggatttgaaggcgg

SEQ ID NO: 4167 - DNA, 23 bp, Homo sapiens
taaaggggataataccctgaggg

SEQ ID NO: 4168 - DNA, 23 bp, Homo sapiens
ttggaatataccagtcagagtgg

SEQ ID NO: 4169 - DNA, 23 bp, Homo sapiens
atatatgccaggagacacctggg

SEQ ID NO: 4170 - DNA, 23 bp, Homo sapiens
aatataacttgtttactgagggg

SEQ ID NO: 4171 - DNA, 23 bp, Homo sapiens
cccttatcaagtgaactgagtgg

SEQ ID NO: 4172 - DNA, 23 bp, Homo sapiens
ggactaagcatccccctgagagg

SEQ ID NO: 4173 - DNA, 23 bp, Homo sapiens
tcgaattgcttcagcccaagggg

SEQ ID NO: 4174 - DNA, 23 bp, Homo sapiens
catgcgcatagtcatacacatgg

SEQ ID NO: 4175 - DNA, 23 bp, Homo sapiens
ggacatagttttcaacagagagg

SEQ ID NO: 4176 - DNA, 23 bp, Homo sapiens
agagtcagatgtcaaccgcaggg

SEQ ID NO: 4177 - DNA, 23 bp, Homo sapiens
tcaagaattataaggcggggagg

SEQ ID NO: 4178 - DNA, 23 bp, Homo sapiens
caggggctcataaagtagtgagg

SEQ ID NO: 4179 - DNA, 23 bp, Homo sapiens
agtattgtcggatatcctcaggg

SEQ ID NO: 4180 - DNA, 23 bp, Homo sapiens
aatgagacttaattacacaaagg

SEQ ID NO: 4181 - DNA, 23 bp, Homo sapiens
aagaaaccagaaaaatcactggg

SEQ ID NO: 4182 - DNA, 23 bp, Homo sapiens
caaaacatctcatcagaacacgg

SEQ ID NO: 4183 - DNA, 23 bp, Homo sapiens
agacaacaggatgttagcagtgg

SEQ ID NO: 4184 - DNA, 23 bp, Homo sapiens
catacttaagatcaagtgggagg

SEQ ID NO: 4185 - DNA, 23 bp, Homo sapiens
aacttctaataagtagactgagg

SEQ ID NO: 4186 - DNA, 23 bp, Homo sapiens
ggatactcactcctctgacgtgg

SEQ ID NO: 4187 - DNA, 23 bp, Homo sapiens
tcgcatctttctgatacatgagg

SEQ ID NO: 4188 - DNA, 23 bp, Homo sapiens
ctaactttcagaagattacgtgg

SEQ ID NO: 4189 - DNA, 23 bp, Homo sapiens
atttgccagtaggatgaggaggg

SEQ ID NO: 4190 - DNA, 23 bp, Homo sapiens
tgataatgatgcttgatgggggg

SEQ ID NO: 4191 - DNA, 23 bp, Homo sapiens
ccccatacttaagatcaagtggg

SEQ ID NO: 4192 - DNA, 23 bp, Homo sapiens
ttacagtccagttacttgagggg

SEQ ID NO: 4193 - DNA, 23 bp, Homo sapiens
aggaaagccctgtaatgacctgg

SEQ ID NO: 4194 - DNA, 23 bp, Homo sapiens
aacactacccatgattacacagg

SEQ ID NO: 4195 - DNA, 23 bp, Homo sapiens
tatggccaattagttgaacatgg

SEQ ID NO: 4196 - DNA, 23 bp, Homo sapiens
taaaagcacaagaggccccgagg

SEQ ID NO: 4197 - DNA, 23 bp, Homo sapiens
gtttaaactacactataatgggg

SEQ ID NO: 4198 - DNA, 23 bp, Homo sapiens
actaatctgtgtatcctacaggg

SEQ ID NO: 4199 - DNA, 23 bp, Homo sapiens
attccaagtacagacaagtgtgg

SEQ ID NO: 4200 - DNA, 23 bp, Homo sapiens
taaacactaagtcttacgaaagg

SEQ ID NO: 4201 - DNA, 23 bp, Homo sapiens
taaactttatgtacccacccagg

SEQ ID NO: 4202 - DNA, 23 bp, Homo sapiens
ttactggacttaaaagaacatgg

SEQ ID NO: 4203 - DNA, 23 bp, Homo sapiens
taatcatgaaaagagtggtgagg

SEQ ID NO: 4204 - DNA, 23 bp, Homo sapiens
tgtgtgtatgtgaacgaggaggg

SEQ ID NO: 4205 - DNA, 23 bp, Homo sapiens
acatcaacagtaaagctagacgg

SEQ ID NO: 4206 - DNA, 23 bp, Homo sapiens
gattaagagaaaaaaaacacggg

SEQ ID NO: 4207 - DNA, 23 bp, Homo sapiens
ctatataatttatatcatggggg

SEQ ID NO: 4208 - DNA, 23 bp, Homo sapiens
aggcacaccactagaacacgggg

SEQ ID NO: 4209 - DNA, 23 bp, Homo sapiens
tttggtacgctttcaaactgggg

SEQ ID NO: 4210 - DNA, 23 bp, Homo sapiens
acagaataagaaagcactagggg

SEQ ID NO: 4211 - DNA, 23 bp, Homo sapiens
atttgaaacaacaagcaaggagg

SEQ ID NO: 4212 - DNA, 23 bp, Homo sapiens
gtatgaaaaggacacgagagagg

SEQ ID NO: 4213 - DNA, 23 bp, Homo sapiens
cagataggtaggttgacaagtgg

SEQ ID NO: 4214 - DNA, 23 bp, Homo sapiens
gatcctttccatagactctgagg

SEQ ID NO: 4215 - DNA, 23 bp, Homo sapiens
acattattatcacagctgcaagg

SEQ ID NO: 4216 - DNA, 23 bp, Homo sapiens
attgggatactcctatgccaggg

SEQ ID NO: 4217 - DNA, 23 bp, Homo sapiens
gatgcgggaaaggtggactgggg

SEQ ID NO: 4218 - DNA, 23 bp, Homo sapiens
gcaaaaagcacagtgtcaagggg

SEQ ID NO: 4219 - DNA, 23 bp, Homo sapiens
taagggcgtagggataggaaagg

SEQ ID NO: 4220 - DNA, 23 bp, Homo sapiens
aatatgtagacatattggcaggg

SEQ ID NO: 4221 - DNA, 23 bp, Homo sapiens
ttttgttttagatattagagagg

SEQ ID NO: 4222 - DNA, 23 bp, Homo sapiens
ggttacatctaacctcacaaagg

SEQ ID NO: 4223 - DNA, 23 bp, Homo sapiens
agaatatgtcagaattcctgggg

SEQ ID NO: 4224 - DNA, 23 bp, Homo sapiens
tagcttccaagaatgagggaagg

SEQ ID NO: 4225 - DNA, 23 bp, Homo sapiens
atctgaggatgtgcttgcagtgg

SEQ ID NO: 4226 - DNA, 23 bp, Homo sapiens
ttggcctcaaagtaacagaaggg

SEQ ID NO: 4227 - DNA, 23 bp, Homo sapiens
acgcatttctacaaaaaccgtgg

SEQ ID NO: 4228 - DNA, 23 bp, Homo sapiens
tcacatgaataaagttcctgagg

SEQ ID NO: 4229 - DNA, 23 bp, Homo sapiens
tgtatggtgtctatatacgtggg

SEQ ID NO: 4230 - DNA, 23 bp, Homo sapiens
ataatgatttccaatcaggtagg

SEQ ID NO: 4231 - DNA, 23 bp, Homo sapiens
cacctggagagtttactgaaagg

SEQ ID NO: 4232 - DNA, 23 bp, Homo sapiens
atatttagcacatgactaggtgg

SEQ ID NO: 4233 - DNA, 23 bp, Homo sapiens
ttcaagaaaaatgttaccagggg

SEQ ID NO: 4234 - DNA, 23 bp, Homo sapiens
gcttatgttaaggaagcatgggg

SEQ ID NO: 4235 - DNA, 23 bp, Homo sapiens
gctagcgagctaaaccaaagagg

SEQ ID NO: 4236 - DNA, 23 bp, Homo sapiens
ggtggactggggatacaatgtgg

SEQ ID NO: 4237 - DNA, 23 bp, Homo sapiens
cacaaagaattgcaaaactgggg

SEQ ID NO: 4238 - DNA, 23 bp, Homo sapiens
gaaagtggagaaaagttcagagg

SEQ ID NO: 4239 - DNA, 23 bp, Homo sapiens
aactttatagtaccctaccctgg

SEQ ID NO: 4240 - DNA, 23 bp, Homo sapiens
gatggttttgagtactcaggagg

SEQ ID NO: 4241 - DNA, 23 bp, Homo sapiens
ttaaatgtaaataatccgtgggg

SEQ ID NO: 4242 - DNA, 23 bp, Homo sapiens
atggccttttggcatctgagagg

SEQ ID NO: 4243 - DNA, 23 bp, Homo sapiens
gaaatggcatattaaaacagagg

SEQ ID NO: 4244 - DNA, 23 bp, Homo sapiens
ccttcatatctgtaatcatgagg

SEQ ID NO: 4245 - DNA, 23 bp, Homo sapiens
gaaactgtaacagttgtaagggg

SEQ ID NO: 4246 - DNA, 23 bp, Homo sapiens
aagaccacaatctacctgggtgg

SEQ ID NO: 4247 - DNA, 23 bp, Homo sapiens
gcagtgtatgaagattcagaagg

SEQ ID NO: 4248 - DNA, 23 bp, Homo sapiens
ttattaattaaagacttacgtgg

SEQ ID NO: 4249 - DNA, 23 bp, Homo sapiens
ggattgatttctcaatctcgggg

SEQ ID NO: 4250 - DNA, 23 bp, Homo sapiens
gattacgtgtgagtggtgctagg

SEQ ID NO: 4251 - DNA, 23 bp, Homo sapiens
gaggattctcagttaaggggagg

SEQ ID NO: 4252 - DNA, 23 bp, Homo sapiens
ttacacataagcagaaggagagg

SEQ ID NO: 4253 - DNA, 23 bp, Homo sapiens
attagcctgtaattttacagcgg

SEQ ID NO: 4254 - DNA, 23 bp, Homo sapiens
gtaaagtggcaaatagttggggg

SEQ ID NO: 4255 - DNA, 23 bp, Homo sapiens
gtttcaagaacagtatactgtgg

SEQ ID NO: 4256 - DNA, 23 bp, Homo sapiens
ttggatgagtagacgaatggagg

SEQ ID NO: 4257 - DNA, 23 bp, Homo sapiens
acgcggcacaataaaacccaagg

SEQ ID NO: 4258 - DNA, 23 bp, Homo sapiens
aatgagcttcctcaaacacaggg

SEQ ID NO: 4259 - DNA, 23 bp, Homo sapiens
aggtaactgaaaactttcagtgg

SEQ ID NO: 4260 - DNA, 23 bp, Homo sapiens
attccaggaaagctgccatgtgg

SEQ ID NO: 4261 - DNA, 23 bp, Homo sapiens
tcaaggacctcagagtcgagtgg

SEQ ID NO: 4262 - DNA, 23 bp, Homo sapiens
acgagattctttcctctcagggg

SEQ ID NO: 4263 - DNA, 23 bp, Homo sapiens
ttgggccagtgtaggccccgtgg

SEQ ID NO: 4264 - DNA, 23 bp, Homo sapiens
gaatttgactgaatagaaagtgg

SEQ ID NO: 4265 - DNA, 23 bp, Homo sapiens
ctttgccaatgaaatgtgtgtgg

SEQ ID NO: 4266 - DNA, 23 bp, Homo sapiens
tttcgtatgaaacctcacattgg

SEQ ID NO: 4267 - DNA, 23 bp, Homo sapiens
agagaggacatgatatccaaggg

SEQ ID NO: 4268 - DNA, 23 bp, Homo sapiens
gtatggggagagtacaggtgtgg

SEQ ID NO: 4269 - DNA, 23 bp, Homo sapiens
gggaaacactaacacaatggtgg

SEQ ID NO: 4270 - DNA, 23 bp, Homo sapiens
attacagactaaataccccctgg

SEQ ID NO: 4271 - DNA, 23 bp, Homo sapiens
tcaaaaaacgtagaacggaaggg

SEQ ID NO: 4272 - DNA, 23 bp, Homo sapiens
ctgaacatgtgtaaagcaagggg

SEQ ID NO: 4273 - DNA, 23 bp, Homo sapiens
tagttgcatttacaatacagtgg

SEQ ID NO: 4274 - DNA, 23 bp, Homo sapiens
gtgtacgtgtgtgtatgcatggg

SEQ ID NO: 4275 - DNA, 23 bp, Homo sapiens
gaagtattagcgaagtgacaggg

SEQ ID NO: 4276 - DNA, 23 bp, Homo sapiens
acctggtgcagaggtccctgagg

SEQ ID NO: 4277 - DNA, 23 bp, Homo sapiens
atgtatgcatgtgttatggtagg

SEQ ID NO: 4278 - DNA, 23 bp, Homo sapiens
aatgtgctggatgaataagaggg

SEQ ID NO: 4279 - DNA, 23 bp, Homo sapiens
atatagcaaatattcaacaatgg

SEQ ID NO: 4280 - DNA, 23 bp, Homo sapiens
atagtatctaggctcagagacgg

SEQ ID NO: 4281 - DNA, 23 bp, Homo sapiens
acacctccacacatatgggaagg

SEQ ID NO: 4282 - DNA, 23 bp, Homo sapiens
tttttttctacataaaaacgtgg

SEQ ID NO: 4283 - DNA, 23 bp, Homo sapiens
cattacgtttccatttgctgcgg

SEQ ID NO: 4284 - DNA, 23 bp, Homo sapiens
aagtgatcaccagagacacatgg

SEQ ID NO: 4285 - DNA, 23 bp, Homo sapiens
gtgtatgttgaagatgaaagggg

SEQ ID NO: 4286 - DNA, 23 bp, Homo sapiens
aaaaactgtctagaaaccacagg

SEQ ID NO: 4287 - DNA, 23 bp, Homo sapiens
attggaaatcaactgcatgaggg

SEQ ID NO: 4288 - DNA, 23 bp, Homo sapiens
tacatccatgaagcagcaagggg

SEQ ID NO: 4289 - DNA, 23 bp, Homo sapiens
gagctttaagagcactttggggg

SEQ ID NO: 4290 - DNA, 23 bp, Homo sapiens
tttagactattcctacaaccagg

SEQ ID NO: 4291 - DNA, 23 bp, Homo sapiens
ctactgcctatctctaccaaagg

SEQ ID NO: 4292 - DNA, 23 bp, Homo sapiens
ggcctgctgtattccctgggtgg

SEQ ID NO: 4293 - DNA, 23 bp, Homo sapiens
aaaaaaccacatcagaccgtggg

SEQ ID NO: 4294 - DNA, 23 bp, Homo sapiens
tgaacttggtaaagaccaagagg

SEQ ID NO: 4295 - DNA, 23 bp, Homo sapiens
aaaaatgattaacaaaacacagg

SEQ ID NO: 4296 - DNA, 23 bp, Homo sapiens
agagaaccagaatgattttgggg

SEQ ID NO: 4297 - DNA, 23 bp, Homo sapiens
acataaggatctacatgcagtgg

SEQ ID NO: 4298 - DNA, 23 bp, Homo sapiens
gtaaactctccaggtgagagggg

SEQ ID NO: 4299 - DNA, 23 bp, Homo sapiens
cttagcaagaagaattggagtgg

SEQ ID NO: 4300 - DNA, 23 bp, Homo sapiens
agtagaaagtaaagaacacaggg

SEQ ID NO: 4301 - DNA, 23 bp, Homo sapiens
gacaaaaccccagagaaaggggg

SEQ ID NO: 4302 - DNA, 23 bp, Homo sapiens
aaataggtagtgccttacaaagg

SEQ ID NO: 4303 - DNA, 23 bp, Homo sapiens
aaatcaaagataacaccacaggg

SEQ ID NO: 4304 - DNA, 23 bp, Homo sapiens
tcctcactatttctgaaacgagg

SEQ ID NO: 4305 - DNA, 23 bp, Homo sapiens
aagattcagctacatctggtggg

SEQ ID NO: 4306 - DNA, 23 bp, Homo sapiens
tggatcaccaggtcattacaggg

SEQ ID NO: 4307 - DNA, 23 bp, Homo sapiens
aaggcttacacataagcagaagg

SEQ ID NO: 4308 - DNA, 23 bp, Homo sapiens
tgagtgacagttaagtggcaggg

SEQ ID NO: 4309 - DNA, 23 bp, Homo sapiens
tgacaggcatgatagaagcaggg

SEQ ID NO: 4310 - DNA, 23 bp, Homo sapiens
gaacagcctgcatattgccacgg

SEQ ID NO: 4311 - DNA, 23 bp, Homo sapiens
tctttcaattaaatatcgggagg

SEQ ID NO: 4312 - DNA, 23 bp, Homo sapiens
acattcatctcaattgagcaagg

SEQ ID NO: 4313 - DNA, 23 bp, Homo sapiens
gataaacagcatttatactgtgg

SEQ ID NO: 4314 - DNA, 23 bp, Homo sapiens
aaagcactagggggcaactgtgg

SEQ ID NO: 4315 - DNA, 23 bp, Homo sapiens
tacatggcatccagagaacaggg

SEQ ID NO: 4316 - DNA, 23 bp, Homo sapiens
gacagcctctacaagtagcaggg

SEQ ID NO: 4317 - DNA, 23 bp, Homo sapiens
tcaggaggtcaatgtaaaggagg

SEQ ID NO: 4318 - DNA, 23 bp, Homo sapiens
aactctatccaggagacatgggg

SEQ ID NO: 4319 - DNA, 23 bp, Homo sapiens
aaggaaaatgacagaaatagcgg

SEQ ID NO: 4320 - DNA, 23 bp, Homo sapiens
aatttgtgtgtgatgtgtggtgg

SEQ ID NO: 4321 - DNA, 23 bp, Homo sapiens
tcaatcccctcatatacagaggg

SEQ ID NO: 4322 - DNA, 23 bp, Homo sapiens
tgagcaaagcaggaaagggtcgg

SEQ ID NO: 4323 - DNA, 23 bp, Homo sapiens
catgtgcctagcacaaatagagg

SEQ ID NO: 4324 - DNA, 23 bp, Homo sapiens
ttgactatcatcacattcagggg

SEQ ID NO: 4325 - DNA, 23 bp, Homo sapiens
ccttagcagataaaatcagtagg

SEQ ID NO: 4326 - DNA, 23 bp, Homo sapiens
gttgtgctcatagggcacaatgg

SEQ ID NO: 4327 - DNA, 23 bp, Homo sapiens
cttctcttgtagatcaccagtgg

SEQ ID NO: 4328 - DNA, 23 bp, Homo sapiens
ggtgataacatttaacaggaggg

SEQ ID NO: 4329 - DNA, 23 bp, Homo sapiens
gctaatatatataattaaggagg

SEQ ID NO: 4330 - DNA, 23 bp, Homo sapiens
gtaatgttgccagtactggaagg

SEQ ID NO: 4331 - DNA, 23 bp, Homo sapiens
tttactatcccaaagttgggggg

SEQ ID NO: 4332 - DNA, 23 bp, Homo sapiens
gttcttgctatcattaagagggg

SEQ ID NO: 4333 - DNA, 23 bp, Homo sapiens
aaagacaggatatataagcaggg

SEQ ID NO: 4334 - DNA, 23 bp, Homo sapiens
tgactctagatgattataggtgg

SEQ ID NO: 4335 - DNA, 23 bp, Homo sapiens
tgaatgtgttcaaaaaaaccagg

SEQ ID NO: 4336 - DNA, 23 bp, Homo sapiens
taggtaaattaaataatgggagg

SEQ ID NO: 4337 - DNA, 23 bp, Homo sapiens
tacacataagcagaaggagaggg

SEQ ID NO: 4338 - DNA, 23 bp, Homo sapiens
taaagtttaaatgtacctagagg

SEQ ID NO: 4339 - DNA, 23 bp, Homo sapiens
gagtgtctccagtgccagagagg

SEQ ID NO: 4340 - DNA, 23 bp, Homo sapiens
gttgtcccagtagaatcagtagg

SEQ ID NO: 4341 - DNA, 23 bp, Homo sapiens
caaaagaccacaatctacctggg

SEQ ID NO: 4342 - DNA, 23 bp, Homo sapiens
agataaatatcggaatctgtggg

SEQ ID NO: 4343 - DNA, 23 bp, Homo sapiens
atttgcagtagaggaaacaaagg

SEQ ID NO: 4344 - DNA, 23 bp, Homo sapiens
aggaacttaaagttcccactagg

SEQ ID NO: 4345 - DNA, 23 bp, Homo sapiens
aatgatggtgaaactggcggtgg

SEQ ID NO: 4346 - DNA, 23 bp, Homo sapiens
ttccctctaacaaacagccatgg

SEQ ID NO: 4347 - DNA, 23 bp, Homo sapiens
catatacatttccccaaccaggg

SEQ ID NO: 4348 - DNA, 23 bp, Homo sapiens
acctgccctctgtatatgagggg

SEQ ID NO: 4349 - DNA, 23 bp, Homo sapiens
tatagttccagcagaaagcgagg

SEQ ID NO: 4350 - DNA, 23 bp, Homo sapiens
gtttactatcccaaagttggggg

SEQ ID NO: 4351 - DNA, 23 bp, Homo sapiens
ttaggcttcagatctagtagagg

SEQ ID NO: 4352 - DNA, 23 bp, Homo sapiens
agtatgttagattttacctgggg

SEQ ID NO: 4353 - DNA, 23 bp, Homo sapiens
atggtatcacctactgtcagagg

SEQ ID NO: 4354 - DNA, 23 bp, Homo sapiens
caaaaggtaagagaataggatgg

SEQ ID NO: 4355 - DNA, 23 bp, Homo sapiens
gctttcatacaataccctgaagg

SEQ ID NO: 4356 - DNA, 23 bp, Homo sapiens
gacacaattataaaaccaagagg

SEQ ID NO: 4357 - DNA, 23 bp, Homo sapiens
atgttggaatctacagaccatgg

SEQ ID NO: 4358 - DNA, 23 bp, Homo sapiens
agtattaccggttgtctaagggg

SEQ ID NO: 4359 - DNA, 23 bp, Homo sapiens
attccaatacgattgctccaagg

SEQ ID NO: 4360 - DNA, 23 bp, Homo sapiens
agatttacctgatggtgaggtgg

SEQ ID NO: 4361 - DNA, 23 bp, Homo sapiens
ggatgaaagaggagacaaagggg

SEQ ID NO: 4362 - DNA, 23 bp, Homo sapiens
cagtgtatgaagattcagaaggg

SEQ ID NO: 4363 - DNA, 23 bp, Homo sapiens
tatccattaacagctaaggaagg

SEQ ID NO: 4364 - DNA, 23 bp, Homo sapiens
gaagccaagatgaggtaaagggg

SEQ ID NO: 4365 - DNA, 23 bp, Homo sapiens
aaattctgtctaatttcacatgg

SEQ ID NO: 4366 - DNA, 23 bp, Homo sapiens
gtaggacagtcaaagagtggagg

SEQ ID NO: 4367 - DNA, 23 bp, Homo sapiens
catatagcatccaagacacaagg

SEQ ID NO: 4368 - DNA, 23 bp, Homo sapiens
atagatgaaaagctctcacaggg

SEQ ID NO: 4369 - DNA, 23 bp, Homo sapiens
ttataagctataatttccagtgg

SEQ ID NO: 4370 - DNA, 23 bp, Homo sapiens
gtagtgaagttgcttatctgagg

SEQ ID NO: 4371 - DNA, 23 bp, Homo sapiens
tcaataaaaccacaaacaccagg

SEQ ID NO: 4372 - DNA, 23 bp, Homo sapiens
aaaggaatggcaaggcacatggg

SEQ ID NO: 4373 - DNA, 23 bp, Homo sapiens
ttatgaaaagaaaaaatccaggg

SEQ ID NO: 4374 - DNA, 23 bp, Homo sapiens
acttgatcttaagtatggggagg

SEQ ID NO: 4375 - DNA, 23 bp, Homo sapiens
tgttatggctaggataacttggg

SEQ ID NO: 4376 - DNA, 23 bp, Homo sapiens
tattactgcagtacaagccaggg

SEQ ID NO: 4377 - DNA, 23 bp, Homo sapiens
aatctatagtgagatatgaaggg

SEQ ID NO: 4378 - DNA, 23 bp, Homo sapiens
ttaattctcatggtcatgcgggg

SEQ ID NO: 4379 - DNA, 23 bp, Homo sapiens
gtgaacatccacatgtacctggg

SEQ ID NO: 4380 - DNA, 23 bp, Homo sapiens
agattacctttctggtagggagg

SEQ ID NO: 4381 - DNA, 23 bp, Homo sapiens
ataaaagtttacaaagacagagg

SEQ ID NO: 4382 - DNA, 23 bp, Homo sapiens
ttaattaaagacttacgtggagg

SEQ ID NO: 4383 - DNA, 23 bp, Homo sapiens
ggcagagcctccattccagaggg

SEQ ID NO: 4384 - DNA, 23 bp, Homo sapiens
ataccagagtaagtacagctagg

SEQ ID NO: 4385 - DNA, 23 bp, Homo sapiens
agtattctgccaaaataaagggg

SEQ ID NO: 4386 - DNA, 23 bp, Homo sapiens
gctgccaacaccacagttggggg

SEQ ID NO: 4387 - DNA, 23 bp, Homo sapiens
acatttactaggcgttaacaagg

SEQ ID NO: 4388 - DNA, 23 bp, Homo sapiens
tgctcccatgcatacccccgtgg

SEQ ID NO: 4389 - DNA, 23 bp, Homo sapiens
ctcaggctttggaaacagggggg

SEQ ID NO: 4390 - DNA, 23 bp, Homo sapiens
gttactttgaagccaagatgagg

SEQ ID NO: 4391 - DNA, 23 bp, Homo sapiens
aagaaagtttgtgaaccactggg

SEQ ID NO: 4392 - DNA, 23 bp, Homo sapiens
aatattgtcaaaaatccacctgg

SEQ ID NO: 4393 - DNA, 23 bp, Homo sapiens
acttctagtattcagaagagagg

SEQ ID NO: 4394 - DNA, 23 bp, Homo sapiens
taaagtatagaagatgtccaagg

SEQ ID NO: 4395 - DNA, 23 bp, Homo sapiens
tacaacctactgattctactggg

SEQ ID NO: 4396 - DNA, 23 bp, Homo sapiens
cctgtgctaagaggcagccaggg

SEQ ID NO: 4397 - DNA, 23 bp, Homo sapiens
tgtcatgtacagtgctaggttgg

SEQ ID NO: 4398 - DNA, 23 bp, Homo sapiens
ttgctaggcttggctttcagcgg

SEQ ID NO: 4399 - DNA, 23 bp, Homo sapiens
aggatgatactgggacaaagtgg

SEQ ID NO: 4400 - DNA, 23 bp, Homo sapiens
gtgggagtgcaagtcaatagggg

SEQ ID NO: 4401 - DNA, 23 bp, Homo sapiens
ggtggtagagactaggctgaagg

SEQ ID NO: 4402 - DNA, 23 bp, Homo sapiens
tgaagaattatattgttgtgggg

SEQ ID NO: 4403 - DNA, 23 bp, Homo sapiens
aagggaactaaaagaatcggagg

SEQ ID NO: 4404 - DNA, 23 bp, Homo sapiens
catcatcctgcatcatgtgtggg

SEQ ID NO: 4405 - DNA, 23 bp, Homo sapiens
gagtgcaagtcaataggggaagg

SEQ ID NO: 4406 - DNA, 23 bp, Homo sapiens
ctatatagtatgtcctaccacgg

SEQ ID NO: 4407 - DNA, 23 bp, Homo sapiens
aagtaataagacatttcctaggg

SEQ ID NO: 4408 - DNA, 23 bp, Homo sapiens
actaaagaacatgtaacagtggg

SEQ ID NO: 4409 - DNA, 23 bp, Homo sapiens
ctaattggccatagttactgagg

SEQ ID NO: 4410 - DNA, 23 bp, Homo sapiens
aagggaagaagacattgtgtcgg

SEQ ID NO: 4411 - DNA, 23 bp, Homo sapiens
atattgatacaggaaacttacgg

SEQ ID NO: 4412 - DNA, 23 bp, Homo sapiens
aaacatatctccctacagaaggg

SEQ ID NO: 4413 - DNA, 23 bp, Homo sapiens
tttactgaaaggcatacctaggg

SEQ ID NO: 4414 - DNA, 23 bp, Homo sapiens
gaacattttctaattgagggtgg

SEQ ID NO: 4415 - DNA, 23 bp, Homo sapiens
aacaagagtgtgttcctgagagg

SEQ ID NO: 4416 - DNA, 23 bp, Homo sapiens
tcaaagaagaccatagcactagg

SEQ ID NO: 4417 - DNA, 23 bp, Homo sapiens
gtaaagcaaggggtcagttgcgg

SEQ ID NO: 4418 - DNA, 23 bp, Homo sapiens
gttatatcatttgacatcggggg

SEQ ID NO: 4419 - DNA, 23 bp, Homo sapiens
atcacctactgttaagacacagg

SEQ ID NO: 4420 - DNA, 23 bp, Homo sapiens
ttcagaaaggagaaacccatggg

SEQ ID NO: 4421 - DNA, 23 bp, Homo sapiens
gagttaagattcggggacagtgg

SEQ ID NO: 4422 - DNA, 23 bp, Homo sapiens
tgagcatctacactgtgtcatgg

SEQ ID NO: 4423 - DNA, 23 bp, Homo sapiens
gaactgggcggactgctacaggg

SEQ ID NO: 4424 - DNA, 23 bp, Homo sapiens
agtatatttctgaggactggggg

SEQ ID NO: 4425 - DNA, 23 bp, Homo sapiens
ttaatgttttcattgaacgcagg

SEQ ID NO: 4426 - DNA, 23 bp, Homo sapiens
ttcataaaatgggaacaaagtgg

SEQ ID NO: 4427 - DNA, 23 bp, Homo sapiens
tctcaatctcggggtatgtgagg

SEQ ID NO: 4428 - DNA, 23 bp, Homo sapiens
gcctaattctacagtaactgggg

SEQ ID NO: 4429 - DNA, 23 bp, Homo sapiens
catcttctttagaaccaagtcgg

SEQ ID NO: 4430 - DNA, 23 bp, Homo sapiens
tccagcatatcctccatgcaggg

SEQ ID NO: 4431 - DNA, 23 bp, Homo sapiens
gcatcagaataattgctagaggg

SEQ ID NO: 4432 - DNA, 23 bp, Homo sapiens
tctggccttaagttcaaaagggg

SEQ ID NO: 4433 - DNA, 23 bp, Homo sapiens
gaaaatcaagaattataaggcgg

SEQ ID NO: 4434 - DNA, 23 bp, Homo sapiens
attgcattggaggaactgcatgg

SEQ ID NO: 4435 - DNA, 23 bp, Homo sapiens
tattgacttgcactcccacaggg

SEQ ID NO: 4436 - DNA, 23 bp, Homo sapiens
atgctggcatgaggagagtgagg

SEQ ID NO: 4437 - DNA, 23 bp, Homo sapiens
ctaatcaaatacaagaaacaggg

SEQ ID NO: 4438 - DNA, 23 bp, Homo sapiens
tggatgctatatgatcctgatgg

SEQ ID NO: 4439 - DNA, 23 bp, Homo sapiens
acacaatggtggcatgatagggg

SEQ ID NO: 4440 - DNA, 23 bp, Homo sapiens
gctatcacatttcccaccatagg

SEQ ID NO: 4441 - DNA, 23 bp, Homo sapiens
gccttcatttctgtgtcacgtgg

SEQ ID NO: 4442 - DNA, 23 bp, Homo sapiens
agccaaggagatcaatgccaggg

SEQ ID NO: 4443 - DNA, 23 bp, Homo sapiens
aaccttctagtcaaactccaggg

SEQ ID NO: 4444 - DNA, 23 bp, Homo sapiens
agaactgctttgtcccccaaagg

SEQ ID NO: 4445 - DNA, 23 bp, Homo sapiens
gtcaccctactatttcctagtgg

SEQ ID NO: 4446 - DNA, 23 bp, Homo sapiens
aggtgataacatttaacaggagg

SEQ ID NO: 4447 - DNA, 23 bp, Homo sapiens
atgtcctgtaaatgttcgagtgg

SEQ ID NO: 4448 - DNA, 23 bp, Homo sapiens
aaatccacccaccccactagggg

SEQ ID NO: 4449 - DNA, 23 bp, Homo sapiens
tcaaggttgataagggtcaaggg

SEQ ID NO: 4450 - DNA, 23 bp, Homo sapiens
caatcagtcagattaaagagagg

SEQ ID NO: 4451 - DNA, 23 bp, Homo sapiens
cctggggtattcatactacaggg

SEQ ID NO: 4452 - DNA, 23 bp, Homo sapiens
gtatacaccaatacttatgaggg

SEQ ID NO: 4453 - DNA, 23 bp, Homo sapiens
gcaaacaataagaagcagatggg

SEQ ID NO: 4454 - DNA, 23 bp, Homo sapiens
agatctacatcagcagccaaagg

SEQ ID NO: 4455 - DNA, 23 bp, Homo sapiens
gacataatgtctgatggcatagg

SEQ ID NO: 4456 - DNA, 23 bp, Homo sapiens
ctgagcacactggagtcctgagg

SEQ ID NO: 4457 - DNA, 23 bp, Homo sapiens
aggatcccagccttcttccgtgg

SEQ ID NO: 4458 - DNA, 23 bp, Homo sapiens
tcactcaataccatggtaggagg

SEQ ID NO: 4459 - DNA, 23 bp, Homo sapiens
cttggcatttcgggaaacagcgg

SEQ ID NO: 4460 - DNA, 23 bp, Homo sapiens
gcaaatttcaggtctctgagggg

SEQ ID NO: 4461 - DNA, 23 bp, Homo sapiens
ctcatgattacagatatgaaggg

SEQ ID NO: 4462 - DNA, 23 bp, Homo sapiens
attccactaaacataacgatggg

SEQ ID NO: 4463 - DNA, 23 bp, Homo sapiens
tattttgtaaagctacggaaggg

SEQ ID NO: 4464 - DNA, 23 bp, Homo sapiens
ttataggggatatttaaaggtgg

SEQ ID NO: 4465 - DNA, 23 bp, Homo sapiens
ttaacctcatcctcataatgggg

SEQ ID NO: 4466 - DNA, 23 bp, Homo sapiens
agatgccccccctttctctgggg

SEQ ID NO: 4467 - DNA, 23 bp, Homo sapiens
aaaaaaaccacatcagaccgtgg

SEQ ID NO: 4468 - DNA, 23 bp, Homo sapiens
aacctgctgcagaacaccctagg

SEQ ID NO: 4469 - DNA, 23 bp, Homo sapiens
aggcagtaatctgagctagaggg

SEQ ID NO: 4470 - DNA, 23 bp, Homo sapiens
gattaacttttggatattggggg

SEQ ID NO: 4471 - DNA, 23 bp, Homo sapiens
tttgcctaagcagctttgggtgg

SEQ ID NO: 4472 - DNA, 23 bp, Homo sapiens
gcactcccgtaggtactgaaagg

SEQ ID NO: 4473 - DNA, 23 bp, Homo sapiens
caaaaccccagagaaaggggggg

SEQ ID NO: 4474 - DNA, 23 bp, Homo sapiens
tggcatatctagcctatggtggg

SEQ ID NO: 4475 - DNA, 23 bp, Homo sapiens
atctctaatcatgaaaagagtgg

SEQ ID NO: 4476 - DNA, 23 bp, Homo sapiens
tctgcaacatgctgaatccacgg

SEQ ID NO: 4477 - DNA, 23 bp, Homo sapiens
aataaatgattacgtgtgagtgg

SEQ ID NO: 4478 - DNA, 23 bp, Homo sapiens
gtatgactaagagtgtggattgg

SEQ ID NO: 4479 - DNA, 23 bp, Homo sapiens
gggcaaatttcaattttatgcgg

SEQ ID NO: 4480 - DNA, 23 bp, Homo sapiens
aaaagcacaagaggccccgaggg

SEQ ID NO: 4481 - DNA, 23 bp, Homo sapiens
ctataaagctataaaatgagtgg

SEQ ID NO: 4482 - DNA, 23 bp, Homo sapiens
tcacgtccagaggcacacactgg

SEQ ID NO: 4483 - DNA, 23 bp, Homo sapiens
aagttggaagaaatattggaagg

SEQ ID NO: 4484 - DNA, 23 bp, Homo sapiens
cttcaaccttcccatatgtgtgg

SEQ ID NO: 4485 - DNA, 23 bp, Homo sapiens
tcaggagtagtagtaactcatgg

SEQ ID NO: 4486 - DNA, 23 bp, Homo sapiens
acattacaaactctgatgagtgg

SEQ ID NO: 4487 - DNA, 23 bp, Homo sapiens
catccagtgtaaaggtgcagagg

SEQ ID NO: 4488 - DNA, 23 bp, Homo sapiens
atcaccagtgggcattcctgagg

SEQ ID NO: 4489 - DNA, 23 bp, Homo sapiens
aatctgtatgactaagagtgtgg

SEQ ID NO: 4490 - DNA, 23 bp, Homo sapiens
gatgccaaaaggccatgactggg

SEQ ID NO: 4491 - DNA, 23 bp, Homo sapiens
ccttgcttacacgatcattgtgg

SEQ ID NO: 4492 - DNA, 23 bp, Homo sapiens
ctcttaatcccatcataaagggg

SEQ ID NO: 4493 - DNA, 23 bp, Homo sapiens
cagaaggaccggagacaggtagg

SEQ ID NO: 4494 - DNA, 23 bp, Homo sapiens
aatccccaactacaatgcgttgg

SEQ ID NO: 4495 - DNA, 23 bp, Homo sapiens
gaataaaactgagcaccgaaagg

SEQ ID NO: 4496 - DNA, 23 bp, Homo sapiens
tctccagtgccagagagggaggg

SEQ ID NO: 4497 - DNA, 23 bp, Homo sapiens
tatgcacatattatatagtgagg

SEQ ID NO: 4498 - DNA, 23 bp, Homo sapiens
gtcaagatctcagtaacactggg

SEQ ID NO: 4499 - DNA, 23 bp, Homo sapiens
gggtgttaagaaaacatgacagg

SEQ ID NO: 4500 - DNA, 23 bp, Homo sapiens
gaaacggtatggtacaaggttgg

SEQ ID NO: 4501 - DNA, 23 bp, Homo sapiens
acagaagtgtcaaagttgagagg

SEQ ID NO: 4502 - DNA, 23 bp, Homo sapiens
tgaccgtacagagatatgaaagg

SEQ ID NO: 4503 - DNA, 23 bp, Homo sapiens
tgtgacttcatgataaaaagggg

SEQ ID NO: 4504 - DNA, 23 bp, Homo sapiens
aattttgtccaattcgcaggtgg

SEQ ID NO: 4505 - DNA, 23 bp, Homo sapiens
tggagccaaaacaatccactagg

SEQ ID NO: 4506 - DNA, 23 bp, Homo sapiens
caaatgacgccacaacaacaagg

SEQ ID NO: 4507 - DNA, 23 bp, Homo sapiens
tttacccataacgtaaaggaagg

SEQ ID NO: 4508 - DNA, 23 bp, Homo sapiens
tagatattaaggcctgtgggggg

SEQ ID NO: 4509 - DNA, 23 bp, Homo sapiens
taaattactgaggaggaagacgg

SEQ ID NO: 4510 - DNA, 23 bp, Homo sapiens
aagctcagtctactttatcaggg

SEQ ID NO: 4511 - DNA, 23 bp, Homo sapiens
tggtatagcaattttccaggtgg

SEQ ID NO: 4512 - DNA, 23 bp, Homo sapiens
ttaacttccataatcaaaggagg

SEQ ID NO: 4513 - DNA, 23 bp, Homo sapiens
ttgtatggtagttacaacattgg

SEQ ID NO: 4514 - DNA, 23 bp, Homo sapiens
tcagtgactctagctgagaaggg

SEQ ID NO: 4515 - DNA, 23 bp, Homo sapiens
aaatcaagaattataaggcgggg

SEQ ID NO: 4516 - DNA, 23 bp, Homo sapiens
gagacacactattaaatgagtgg

SEQ ID NO: 4517 - DNA, 23 bp, Homo sapiens
ataagtattggtgtatacagtgg

SEQ ID NO: 4518 - DNA, 23 bp, Homo sapiens
atgaaacattcagtagcagtggg

SEQ ID NO: 4519 - DNA, 23 bp, Homo sapiens
tttcttgtaatgcacatggaggg

SEQ ID NO: 4520 - DNA, 23 bp, Homo sapiens
tcaccctactatttcctagtggg

SEQ ID NO: 4521 - DNA, 23 bp, Homo sapiens
accacagtcactgaagccctggg

SEQ ID NO: 4522 - DNA, 23 bp, Homo sapiens
aggattttggttataccaagtgg

SEQ ID NO: 4523 - DNA, 23 bp, Homo sapiens
aacaaatcctaatgaacccaggg

SEQ ID NO: 4524 - DNA, 23 bp, Homo sapiens
ggtgaagaaaggagagtcgtggg

SEQ ID NO: 4525 - DNA, 23 bp, Homo sapiens
ggcaagcttgcctaaaagtgagg

SEQ ID NO: 4526 - DNA, 23 bp, Homo sapiens
ttgtggagagaactacgctaggg

SEQ ID NO: 4527 - DNA, 23 bp, Homo sapiens
aatcaatttcaggcactgaacgg

SEQ ID NO: 4528 - DNA, 23 bp, Homo sapiens
ggagtatctcgccacgtcagagg

SEQ ID NO: 4529 - DNA, 23 bp, Homo sapiens
gagaggcatagggagaataacgg

SEQ ID NO: 4530 - DNA, 23 bp, Homo sapiens
aaaaacctaactttagaacccgg

SEQ ID NO: 4531 - DNA, 23 bp, Homo sapiens
gaacgttttatcatgatctgggg

SEQ ID NO: 4532 - DNA, 23 bp, Homo sapiens
ttactgtgctaatccacacctgg

SEQ ID NO: 4533 - DNA, 23 bp, Homo sapiens
gttataatccacatgataccagg

SEQ ID NO: 4534 - DNA, 23 bp, Homo sapiens
ctatacaaacataccacccaggg

SEQ ID NO: 4535 - DNA, 23 bp, Homo sapiens
tcacatactgagaactgcatagg

SEQ ID NO: 4536 - DNA, 23 bp, Homo sapiens
ttgaacacttgctagctgcaagg

SEQ ID NO: 4537 - DNA, 23 bp, Homo sapiens
gcaggcacaccactagaacacgg

SEQ ID NO: 4538 - DNA, 23 bp, Homo sapiens
gataatgatattttaaaccaagg

SEQ ID NO: 4539 - DNA, 23 bp, Homo sapiens
gtttgacatgaccgtaatggagg

SEQ ID NO: 4540 - DNA, 23 bp, Homo sapiens
gtacactatttgtcaaccaaagg

SEQ ID NO: 4541 - DNA, 23 bp, Homo sapiens
acatgccctttatggcacaatgg

SEQ ID NO: 4542 - DNA, 23 bp, Homo sapiens
ttagcttacctataacaaagtgg

SEQ ID NO: 4543 - DNA, 23 bp, Homo sapiens
attcacacatcaatcagaagtgg

SEQ ID NO: 4544 - DNA, 23 bp, Homo sapiens
tacactataagataaatgtaggg

SEQ ID NO: 4545 - DNA, 23 bp, Homo sapiens
gagagattgaaagactctgtagg

SEQ ID NO: 4546 - DNA, 23 bp, Homo sapiens
actctgttggcacattgcagggg

SEQ ID NO: 4547 - DNA, 23 bp, Homo sapiens
ccatacacaactgcaccgtaggg

SEQ ID NO: 4548 - DNA, 23 bp, Homo sapiens
aattttctgtaaagtagcagagg

SEQ ID NO: 4549 - DNA, 23 bp, Homo sapiens
aatttaatcacagcagtcaaggg

SEQ ID NO: 4550 - DNA, 23 bp, Homo sapiens
cctctcgcgtcatagtttggggg

SEQ ID NO: 4551 - DNA, 23 bp, Homo sapiens
acatagtacaaaattcatagagg

SEQ ID NO: 4552 - DNA, 23 bp, Homo sapiens
acacaggttcataatgccacagg

SEQ ID NO: 4553 - DNA, 23 bp, Homo sapiens
agacaaatctagaaacaactagg

SEQ ID NO: 4554 - DNA, 23 bp, Homo sapiens
aatgtgttacagtaaggaggagg

SEQ ID NO: 4555 - DNA, 23 bp, Homo sapiens
tctgtagtagagaatgttggagg

SEQ ID NO: 4556 - DNA, 23 bp, Homo sapiens
actggaatccaggagccagatgg

SEQ ID NO: 4557 - DNA, 23 bp, Homo sapiens
tcaatcctccagtttctaccggg

SEQ ID NO: 4558 - DNA, 23 bp, Homo sapiens
taaatgttatcacctggaggtgg

SEQ ID NO: 4559 - DNA, 23 bp, Homo sapiens
tagaatttgtaggagtaaggagg

SEQ ID NO: 4560 - DNA, 23 bp, Homo sapiens
atgaggcctaagatttggagtgg

SEQ ID NO: 4561 - DNA, 23 bp, Homo sapiens
ttttgaagagaaaatgtgggtgg

SEQ ID NO: 4562 - DNA, 23 bp, Homo sapiens
ggatgaggagggcatagcagagg

SEQ ID NO: 4563 - DNA, 23 bp, Homo sapiens
ctgtgtgtgatccatggggtagg

SEQ ID NO: 4564 - DNA, 23 bp, Homo sapiens
acagccatcaaggtgtacttggg

SEQ ID NO: 4565 - DNA, 23 bp, Homo sapiens
gtatttgcttttcattgtggggg

SEQ ID NO: 4566 - DNA, 23 bp, Homo sapiens
aggtctgtagtagagaatgttgg

SEQ ID NO: 4567 - DNA, 23 bp, Homo sapiens
ggagaagaggaaggtctgaaagg

SEQ ID NO: 4568 - DNA, 23 bp, Homo sapiens
tcaaacctgtagctctatggagg

SEQ ID NO: 4569 - DNA, 23 bp, Homo sapiens
gactggtattgctagtagaacgg

SEQ ID NO: 4570 - DNA, 23 bp, Homo sapiens
gaagctgttgaagagccttgtgg

SEQ ID NO: 4571 - DNA, 23 bp, Homo sapiens
tcagctaagcatgctaacctcgg

SEQ ID NO: 4572 - DNA, 23 bp, Homo sapiens
gatcagaggcttcagtagggagg

SEQ ID NO: 4573 - DNA, 23 bp, Homo sapiens
ttcatagcaagacaatagatggg

SEQ ID NO: 4574 - DNA, 23 bp, Homo sapiens
tcaagctgaatacaattcagtgg

SEQ ID NO: 4575 - DNA, 23 bp, Homo sapiens
taatcacctaccccgaccaatgg

SEQ ID NO: 4576 - DNA, 23 bp, Homo sapiens
tcaaagatgtagactgacactgg

SEQ ID NO: 4577 - DNA, 23 bp, Homo sapiens
gtagaactgtatgtacatgaagg

SEQ ID NO: 4578 - DNA, 23 bp, Homo sapiens
catgtagctaaggttgctaacgg

SEQ ID NO: 4579 - DNA, 23 bp, Homo sapiens
ccttgggatgggaaacacaatgg

SEQ ID NO: 4580 - DNA, 23 bp, Homo sapiens
ctttcatacaataccctgaaggg

SEQ ID NO: 4581 - DNA, 23 bp, Homo sapiens
ctaattacaatctatcccaatgg

SEQ ID NO: 4582 - DNA, 23 bp, Homo sapiens
gttccctgcttgaagtacccggg

SEQ ID NO: 4583 - DNA, 23 bp, Homo sapiens
gtaaacatcagaagacctcaagg

SEQ ID NO: 4584 - DNA, 23 bp, Homo sapiens
acacagctgatataatttggtgg

SEQ ID NO: 4585 - DNA, 23 bp, Homo sapiens
acataggcaatagtaaatcaggg

SEQ ID NO: 4586 - DNA, 23 bp, Homo sapiens
ttgagcactgtgtttgctggagg

SEQ ID NO: 4587 - DNA, 23 bp, Homo sapiens
agtataatatgtgcaaaactggg

SEQ ID NO: 4588 - DNA, 23 bp, Homo sapiens
tgttactagaactaaaatgaggg

SEQ ID NO: 4589 - DNA, 23 bp, Homo sapiens
tttgactgggctattctgggagg

SEQ ID NO: 4590 - DNA, 23 bp, Homo sapiens
gcatgtctaagaacatccctagg

SEQ ID NO: 4591 - DNA, 23 bp, Homo sapiens
cgagcagagctattgtgccatgg

SEQ ID NO: 4592 - DNA, 23 bp, Homo sapiens
tctattggaggaaatacagatgg

SEQ ID NO: 4593 - DNA, 23 bp, Homo sapiens
aggtaattgggaaatccagttgg

SEQ ID NO: 4594 - DNA, 23 bp, Homo sapiens
gtggtaagcagtctccagaatgg

SEQ ID NO: 4595 - DNA, 23 bp, Homo sapiens
ataaagggttcaaaaatctgtgg

SEQ ID NO: 4596 - DNA, 23 bp, Homo sapiens
tacaatttcctcaaaaactgggg

SEQ ID NO: 4597 - DNA, 23 bp, Homo sapiens
ccacaatgatcgtgtaagcaagg

SEQ ID NO: 4598 - DNA, 23 bp, Homo sapiens
gagaacactttttagagccaggg

SEQ ID NO: 4599 - DNA, 23 bp, Homo sapiens
agctccaaatttaagaaacacgg

SEQ ID NO: 4600 - DNA, 23 bp, Homo sapiens
cctggctgcctcttagcacaggg

SEQ ID NO: 4601 - DNA, 23 bp, Homo sapiens
tttcagaaaggagaaacccatgg

SEQ ID NO: 4602 - DNA, 23 bp, Homo sapiens
aacactttggtaacaacagtagg

SEQ ID NO: 4603 - DNA, 23 bp, Homo sapiens
cattccactaaacataacgatgg

SEQ ID NO: 4604 - DNA, 23 bp, Homo sapiens
gtgatctacaagagaagttgggg

SEQ ID NO: 4605 - DNA, 23 bp, Homo sapiens
cctagtcttgcaaatgctagggg

SEQ ID NO: 4606 - DNA, 23 bp, Homo sapiens
ttgggtaacgagatcactaaggg

SEQ ID NO: 4607 - DNA, 23 bp, Homo sapiens
tatatagcttccaagaatgaggg

SEQ ID NO: 4608 - DNA, 23 bp, Homo sapiens
acccttcacatgataaaatgggg

SEQ ID NO: 4609 - DNA, 23 bp, Homo sapiens
attacaaaaaggacaagccatgg

SEQ ID NO: 4610 - DNA, 23 bp, Homo sapiens
accaaacagtggcattgaagagg

SEQ ID NO: 4611 - DNA, 23 bp, Homo sapiens
cacaggcatctagatatggcagg

SEQ ID NO: 4612 - DNA, 23 bp, Homo sapiens
tatatgttgcggcaatgaagagg

SEQ ID NO: 4613 - DNA, 23 bp, Homo sapiens
gtcttgatgatgccaatgctagg

SEQ ID NO: 4614 - DNA, 23 bp, Homo sapiens
taccaagtttccatttacaaggg

SEQ ID NO: 4615 - DNA, 23 bp, Homo sapiens
taatttgtcttggaatgatgcgg

SEQ ID NO: 4616 - DNA, 23 bp, Homo sapiens
caacataataggacagcccaggg

SEQ ID NO: 4617 - DNA, 23 bp, Homo sapiens
gtattaccggttgtctaaggggg

SEQ ID NO: 4618 - DNA, 23 bp, Homo sapiens
ggattgatcccaggtacatgtgg

SEQ ID NO: 4619 - DNA, 23 bp, Homo sapiens
gtgtaatgttatgaaagaaaggg

SEQ ID NO: 4620 - DNA, 23 bp, Homo sapiens
acaaacagatgagtttcagtggg

SEQ ID NO: 4621 - DNA, 23 bp, Homo sapiens
gcagatcagaggcttcagtaggg

SEQ ID NO: 4622 - DNA, 23 bp, Homo sapiens
ctatgcctctcacagccagaagg

SEQ ID NO: 4623 - DNA, 23 bp, Homo sapiens
agtttgtaagtatattaggaagg

SEQ ID NO: 4624 - DNA, 23 bp, Homo sapiens
cattaactcaatcagagtcccgg

SEQ ID NO: 4625 - DNA, 23 bp, Homo sapiens
taaacccaaggctttaagagtgg

SEQ ID NO: 4626 - DNA, 23 bp, Homo sapiens
agacaaaaccccagagaaagggg

SEQ ID NO: 4627 - DNA, 23 bp, Homo sapiens
ataaaagagtgcccagatgaggg

SEQ ID NO: 4628 - DNA, 23 bp, Homo sapiens
atattttgtacacatatgaaagg

SEQ ID NO: 4629 - DNA, 23 bp, Homo sapiens
acataaagaagacttaaactagg

SEQ ID NO: 4630 - DNA, 23 bp, Homo sapiens
tgccatggcatgaaatccaaagg

SEQ ID NO: 4631 - DNA, 23 bp, Homo sapiens
tcaatggtagttggtcatgatgg

SEQ ID NO: 4632 - DNA, 23 bp, Homo sapiens
gtacccacccaggtagattgtgg

SEQ ID NO: 4633 - DNA, 23 bp, Homo sapiens
gctcagagctcacctactaaggg

SEQ ID NO: 4634 - DNA, 23 bp, Homo sapiens
agtctgactttgctcagtgaagg

SEQ ID NO: 4635 - DNA, 23 bp, Homo sapiens
ttctcttgtagatcaccagtggg

SEQ ID NO: 4636 - DNA, 23 bp, Homo sapiens
tctatgagtactcagttccaggg

SEQ ID NO: 4637 - DNA, 23 bp, Homo sapiens
gcttactaatggatgtcactagg

SEQ ID NO: 4638 - DNA, 23 bp, Homo sapiens
gtcctgctagatcaggcataggg

SEQ ID NO: 4639 - DNA, 23 bp, Homo sapiens
cagctgatctatcacgtcatggg

SEQ ID NO: 4640 - DNA, 23 bp, Homo sapiens
gcttagggagatcactctgttgg

SEQ ID NO: 4641 - DNA, 23 bp, Homo sapiens
tgactacacttctgacaccctgg

SEQ ID NO: 4642 - DNA, 23 bp, Homo sapiens
attgtggagagaactacgctagg

SEQ ID NO: 4643 - DNA, 23 bp, Homo sapiens
acaaaaccccagagaaagggggg

SEQ ID NO: 4644 - DNA, 23 bp, Homo sapiens
gggaggatacaccctcatctggg

SEQ ID NO: 4645 - DNA, 23 bp, Homo sapiens
ctcctggtagcaaacaatgaggg

SEQ ID NO: 4646 - DNA, 23 bp, Homo sapiens
aattccattggaatgacggaagg

SEQ ID NO: 4647 - DNA, 23 bp, Homo sapiens
atcatgttctcaagaagaccagg

SEQ ID NO: 4648 - DNA, 23 bp, Homo sapiens
tatgaaagtgacaaagcaagtgg

SEQ ID NO: 4649 - DNA, 23 bp, Homo sapiens
gttcctagctgtacttactctgg

SEQ ID NO: 4650 - DNA, 23 bp, Homo sapiens
agatgtttatattctgacgaagg

SEQ ID NO: 4651 - DNA, 23 bp, Homo sapiens
agtgtcaataaaggattcagagg

SEQ ID NO: 4652 - DNA, 23 bp, Homo sapiens
cttgatcttaagtatggggaggg

SEQ ID NO: 4653 - DNA, 23 bp, Homo sapiens
ctgtattctgtaattgctagggg

SEQ ID NO: 4654 - DNA, 23 bp, Homo sapiens
tagtaatgcttatcttgccgagg

SEQ ID NO: 4655 - DNA, 23 bp, Homo sapiens
acatcagaccgtgggaacggggg

SEQ ID NO: 4656 - DNA, 23 bp, Homo sapiens
atgtaatagtcaatacgcccagg

SEQ ID NO: 4657 - DNA, 23 bp, Homo sapiens
ggaggcaagcatagatcttgggg

SEQ ID NO: 4658 - DNA, 23 bp, Homo sapiens
ctgatggcataggctccagatgg

SEQ ID NO: 4659 - DNA, 23 bp, Homo sapiens
tttgaaacaacaagcaaggaggg

SEQ ID NO: 4660 - DNA, 23 bp, Homo sapiens
ttgtatggtgtctatatacgtgg

SEQ ID NO: 4661 - DNA, 23 bp, Homo sapiens
aatgttattgagtttatctgtgg

SEQ ID NO: 4662 - DNA, 23 bp, Homo sapiens
tgttaaacctagcaaaagagtgg

SEQ ID NO: 4663 - DNA, 23 bp, Homo sapiens
gcttcagcctaccttagactagg

SEQ ID NO: 4664 - DNA, 23 bp, Homo sapiens
ttaaaatattgaaatagcgaggg

SEQ ID NO: 4665 - DNA, 23 bp, Homo sapiens
gtgtatttgcagactatcagtgg

SEQ ID NO: 4666 - DNA, 23 bp, Homo sapiens
attagcacatcttaacccatagg

SEQ ID NO: 4667 - DNA, 23 bp, Homo sapiens
aattgatcgcgatagcagtaggg

SEQ ID NO: 4668 - DNA, 23 bp, Homo sapiens
gagctaaaaggctcccccaaagg

SEQ ID NO: 4669 - DNA, 23 bp, Homo sapiens
tatgctagtacatcagacatagg

SEQ ID NO: 4670 - DNA, 23 bp, Homo sapiens
gcaaagtacctaagtaacaaagg

SEQ ID NO: 4671 - DNA, 23 bp, Homo sapiens
acattggatgagtagacgaatgg

SEQ ID NO: 4672 - DNA, 23 bp, Homo sapiens
ggttggagtacttacaagaacgg

SEQ ID NO: 4673 - DNA, 23 bp, Homo sapiens
atgatggctgatatttcccatgg

SEQ ID NO: 4674 - DNA, 23 bp, Homo sapiens
aatgtgagcccatcaaaggcagg

SEQ ID NO: 4675 - DNA, 23 bp, Homo sapiens
agtggagaaaagttcagaggggg

SEQ ID NO: 4676 - DNA, 23 bp, Homo sapiens
agaagcatacaaagtatacaagg

SEQ ID NO: 4677 - DNA, 23 bp, Homo sapiens
gatttggcttacaggttcagggg

SEQ ID NO: 4678 - DNA, 23 bp, Homo sapiens
tccatagtcaatgatggcgatgg

SEQ ID NO: 4679 - DNA, 23 bp, Homo sapiens
agcttacggcaaggatgcagggg

SEQ ID NO: 4680 - DNA, 23 bp, Homo sapiens
tcttccggaatacaatgttgtgg

SEQ ID NO: 4681 - DNA, 23 bp, Homo sapiens
taacatatacaattttacaaggg

SEQ ID NO: 4682 - DNA, 23 bp, Homo sapiens
gaacagagatgtcatacagatgg

SEQ ID NO: 4683 - DNA, 23 bp, Homo sapiens
agcatgataagcatgatgtaggg

SEQ ID NO: 4684 - DNA, 23 bp, Homo sapiens
ataactgctttgccaatgtgagg

SEQ ID NO: 4685 - DNA, 23 bp, Homo sapiens
tctgttctctgttataaaggagg

SEQ ID NO: 4686 - DNA, 23 bp, Homo sapiens
aaagtggagaaaagttcagaggg

SEQ ID NO: 4687 - DNA, 23 bp, Homo sapiens
atcatcacattcaggggcaaggg

SEQ ID NO: 4688 - DNA, 23 bp, Homo sapiens
acagaatgtgccaagcgtgtagg

SEQ ID NO: 4689 - DNA, 23 bp, Homo sapiens
ataaggactctgaaatgcaaggg

SEQ ID NO: 4690 - DNA, 23 bp, Homo sapiens
aatcaggtaggcaggaaatgagg

SEQ ID NO: 4691 - DNA, 23 bp, Homo sapiens
catcaatcagaagtggtgtaggg

SEQ ID NO: 4692 - DNA, 23 bp, Homo sapiens
atcacatgtccaatattactggg

SEQ ID NO: 4693 - DNA, 23 bp, Homo sapiens
ctcaagaagcaaacaaaccaagg

SEQ ID NO: 4694 - DNA, 23 bp, Homo sapiens
tctgaacttcaaatacactctgg

SEQ ID NO: 4695 - DNA, 23 bp, Homo sapiens
catcacacaatatatggccgtgg

SEQ ID NO: 4696 - DNA, 23 bp, Homo sapiens
aaagaaccaaaaggaacccaagg

SEQ ID NO: 4697 - DNA, 23 bp, Homo sapiens
cagttgagactacaccttggagg

SEQ ID NO: 4698 - DNA, 23 bp, Homo sapiens
cagaagtgtcaaagttgagaggg

SEQ ID NO: 4699 - DNA, 23 bp, Homo sapiens
taagagaaaatacagtctagagg

SEQ ID NO: 4700 - DNA, 23 bp, Homo sapiens
actacacagagaaaagttgtggg

SEQ ID NO: 4701 - DNA, 23 bp, Homo sapiens
gtagtaagtactgctttacatgg

SEQ ID NO: 4702 - DNA, 23 bp, Homo sapiens
ctggcactgtagttaagagatgg

SEQ ID NO: 4703 - DNA, 23 bp, Homo sapiens
gttggcctcaaagtaacagaagg

SEQ ID NO: 4704 - DNA, 23 bp, Homo sapiens
acactgcactcagttgataacgg

SEQ ID NO: 4705 - DNA, 23 bp, Homo sapiens
aaggatacttgggagcaggttgg

SEQ ID NO: 4706 - DNA, 23 bp, Homo sapiens
cacacctcaggaatgcccactgg

SEQ ID NO: 4707 - DNA, 23 bp, Homo sapiens
taatgtatccaagacaacattgg

SEQ ID NO: 4708 - DNA, 23 bp, Homo sapiens
actccactccctctcttgaaggg

SEQ ID NO: 4709 - DNA, 23 bp, Homo sapiens
aaatttgctgtgataaacagtgg

SEQ ID NO: 4710 - DNA, 23 bp, Homo sapiens
gtagatattaaggcctgtggggg

SEQ ID NO: 4711 - DNA, 23 bp, Homo sapiens
tgtgggtggcagtaagggaaggg

SEQ ID NO: 4712 - DNA, 23 bp, Homo sapiens
aaatacacttactatcctaaggg

SEQ ID NO: 4713 - DNA, 23 bp, Homo sapiens
gagttcacatgccagtaaagtgg

SEQ ID NO: 4714 - DNA, 23 bp, Homo sapiens
gttagagagaaattatagagcgg

SEQ ID NO: 4715 - DNA, 23 bp, Homo sapiens
cctgtggtgataaacagcattgg

SEQ ID NO: 4716 - DNA, 23 bp, Homo sapiens
ggaaagggatgaagttgtgaagg

SEQ ID NO: 4717 - DNA, 23 bp, Homo sapiens
gttcccactaggaaatagtaggg

SEQ ID NO: 4718 - DNA, 23 bp, Homo sapiens
tttagaaatgggatatcctgggg

SEQ ID NO: 4719 - DNA, 23 bp, Homo sapiens
acctggacattatgaaagagagg

SEQ ID NO: 4720 - DNA, 23 bp, Homo sapiens
ttatttcctggaacagaacacgg

SEQ ID NO: 4721 - DNA, 23 bp, Homo sapiens
aaataaggaactttgtcccaagg

SEQ ID NO: 4722 - DNA, 23 bp, Homo sapiens
cattttggagattccatgtgtgg

SEQ ID NO: 4723 - DNA, 23 bp, Homo sapiens
ttttatttaatacttttgggtgg

SEQ ID NO: 4724 - DNA, 23 bp, Homo sapiens
tactgggagtctccgatagtggg

SEQ ID NO: 4725 - DNA, 23 bp, Homo sapiens
caagtaatatggacagcacaagg

SEQ ID NO: 4726 - DNA, 23 bp, Homo sapiens
taaaccttgattaaaagccaagg

SEQ ID NO: 4727 - DNA, 23 bp, Homo sapiens
ttttccttatgtgtcagacgagg

SEQ ID NO: 4728 - DNA, 23 bp, Homo sapiens
aacaacaaatataaaaaaggtgg

SEQ ID NO: 4729 - DNA, 23 bp, Homo sapiens
gctactgaatgtttcatacctgg

SEQ ID NO: 4730 - DNA, 23 bp, Homo sapiens
atctatctctttaggaccagggg

SEQ ID NO: 4731 - DNA, 23 bp, Homo sapiens
ttaactataatagagcccttcgg

SEQ ID NO: 4732 - DNA, 23 bp, Homo sapiens
ctttgggtggttaatcaagtcgg

SEQ ID NO: 4733 - DNA, 23 bp, Homo sapiens
gtatcaaggtctcgatcgagagg

SEQ ID NO: 4734 - DNA, 23 bp, Homo sapiens
ggggaaataatacttatcaaagg

SEQ ID NO: 4735 - DNA, 23 bp, Homo sapiens
cttgccagtttttttcagtgggg

SEQ ID NO: 4736 - DNA, 23 bp, Homo sapiens
ataacatttcaaaatgccctggg

SEQ ID NO: 4737 - DNA, 23 bp, Homo sapiens
ggtgggtctatccaaggctgagg

SEQ ID NO: 4738 - DNA, 23 bp, Homo sapiens
gggaagactggtatgtgtaaggg

SEQ ID NO: 4739 - DNA, 23 bp, Homo sapiens
tttattaatgccagtgactgcgg

SEQ ID NO: 4740 - DNA, 23 bp, Homo sapiens
tctctgtgtctctaacctgaggg

SEQ ID NO: 4741 - DNA, 23 bp, Homo sapiens
catgtttacaggcatgggagagg

SEQ ID NO: 4742 - DNA, 23 bp, Homo sapiens
tgtcttttgcctggaaaccaggg

SEQ ID NO: 4743 - DNA, 23 bp, Homo sapiens
gaattacagcagaggaggcgagg

SEQ ID NO: 4744 - DNA, 23 bp, Homo sapiens
ttccttatgtgtcagacgagggg

SEQ ID NO: 4745 - DNA, 23 bp, Homo sapiens
ggtactagagttaaaagaagagg

SEQ ID NO: 4746 - DNA, 23 bp, Homo sapiens
gatttccattaacgatggtgtgg

SEQ ID NO: 4747 - DNA, 23 bp, Homo sapiens
aattcctcctccaaaaatcaggg

SEQ ID NO: 4748 - DNA, 23 bp, Homo sapiens
atctagatatggcaggcagtagg

SEQ ID NO: 4749 - DNA, 23 bp, Homo sapiens
tacagtctaaaatcaagagaagg

SEQ ID NO: 4750 - DNA, 23 bp, Homo sapiens
gtttcatacctggtatcatgtgg

SEQ ID NO: 4751 - DNA, 23 bp, Homo sapiens
gtttcttgcactaaaagatgagg

SEQ ID NO: 4752 - DNA, 23 bp, Homo sapiens
tggaggatgaagaatgacaaggg

SEQ ID NO: 4753 - DNA, 23 bp, Homo sapiens
tgatttgatcacagttcaggtgg

SEQ ID NO: 4754 - DNA, 23 bp, Homo sapiens
gaaacagttttcctgccgaaggg

SEQ ID NO: 4755 - DNA, 23 bp, Homo sapiens
taggcaagctgctacaaggaagg

SEQ ID NO: 4756 - DNA, 23 bp, Homo sapiens
ttttgctcctggccaaaggaggg

SEQ ID NO: 4757 - DNA, 23 bp, Homo sapiens
aaaaaatgttcaatcaaaggtgg

SEQ ID NO: 4758 - DNA, 23 bp, Homo sapiens
atataattctaggaatccatagg

SEQ ID NO: 4759 - DNA, 23 bp, Homo sapiens
tgaataataatgggaaatggagg

SEQ ID NO: 4760 - DNA, 23 bp, Homo sapiens
tcttgcttcactttaatgtgagg

SEQ ID NO: 4761 - DNA, 23 bp, Homo sapiens
atgtacttacatgattatgtagg

SEQ ID NO: 4762 - DNA, 23 bp, Homo sapiens
tcccctacttttcctactgtagg

SEQ ID NO: 4763 - DNA, 23 bp, Homo sapiens
ttacatccatgaagcagcaaggg

SEQ ID NO: 4764 - DNA, 23 bp, Homo sapiens
aatgaggattctcagttaagggg

SEQ ID NO: 4765 - DNA, 23 bp, Homo sapiens
cctaccacgggggtatgcatggg

SEQ ID NO: 4766 - DNA, 23 bp, Homo sapiens
cctagggtataataggaggcagg

SEQ ID NO: 4767 - DNA, 23 bp, Homo sapiens
caaagagtaaattactgaggagg

SEQ ID NO: 4768 - DNA, 23 bp, Homo sapiens
tctccagtgatactttaacatgg

SEQ ID NO: 4769 - DNA, 23 bp, Homo sapiens
ctcaggacaagtagatagggagg

SEQ ID NO: 4770 - DNA, 23 bp, Homo sapiens
tgcaggatctaccggaaagtagg

SEQ ID NO: 4771 - DNA, 23 bp, Homo sapiens
agttcaagagtcgatgaagaggg

SEQ ID NO: 4772 - DNA, 23 bp, Homo sapiens
cataacatgttataaaacatagg

SEQ ID NO: 4773 - DNA, 23 bp, Homo sapiens
acctcctatgtccacccccacgg

SEQ ID NO: 4774 - DNA, 23 bp, Homo sapiens
tacatagatcttgtatcccaggg

SEQ ID NO: 4775 - DNA, 23 bp, Homo sapiens
gatacaaataatgtagcgaaggg

SEQ ID NO: 4776 - DNA, 23 bp, Homo sapiens
tagacagacccttacaggcatgg

SEQ ID NO: 4777 - DNA, 23 bp, Homo sapiens
agataggtgatgaaaaagctggg

SEQ ID NO: 4778 - DNA, 23 bp, Homo sapiens
agatgtagatgggatctcactgg

SEQ ID NO: 4779 - DNA, 23 bp, Homo sapiens
gcaaggcagctatatagcaaagg

SEQ ID NO: 4780 - DNA, 23 bp, Homo sapiens
ctattaccatgaaatacactagg

SEQ ID NO: 4781 - DNA, 23 bp, Homo sapiens
caaattctatgaggtagagaggg

SEQ ID NO: 4782 - DNA, 23 bp, Homo sapiens
ccctaggggtgtaatcaagaggg

SEQ ID NO: 4783 - DNA, 23 bp, Homo sapiens
tagtttccgtactcccctagtgg

SEQ ID NO: 4784 - DNA, 23 bp, Homo sapiens
tttagaattcacttacacaatgg

SEQ ID NO: 4785 - DNA, 23 bp, Homo sapiens
agagaaggagatttacctgatgg

SEQ ID NO: 4786 - DNA, 23 bp, Homo sapiens
atacattagatttatgcagaggg

SEQ ID NO: 4787 - DNA, 23 bp, Homo sapiens
gacaagacctgtaaatgcccggg

SEQ ID NO: 4788 - DNA, 23 bp, Homo sapiens
acccccagtaagagagaaggagg

SEQ ID NO: 4789 - DNA, 23 bp, Homo sapiens
ttatgaacctgtgtaatcatggg

SEQ ID NO: 4790 - DNA, 23 bp, Homo sapiens
tctcacttcttattaacagaggg

SEQ ID NO: 4791 - DNA, 23 bp, Homo sapiens
gaactgagtgggctcagtgtggg

SEQ ID NO: 4792 - DNA, 23 bp, Homo sapiens
atagatacaagtatattgaaagg

SEQ ID NO: 4793 - DNA, 23 bp, Homo sapiens
gagtccttatcagtattcaaagg

SEQ ID NO: 4794 - DNA, 23 bp, Homo sapiens
ttagaataatcaggaaccagtgg

SEQ ID NO: 4795 - DNA, 23 bp, Homo sapiens
ttctttcccaaggccaagagggg

SEQ ID NO: 4796 - DNA, 23 bp, Homo sapiens
agcaagaaggtaaccaaaagggg

SEQ ID NO: 4797 - DNA, 23 bp, Homo sapiens
caggcagaaggcatttccagagg

SEQ ID NO: 4798 - DNA, 23 bp, Homo sapiens
gatcttgttacctgaatcagggg

SEQ ID NO: 4799 - DNA, 23 bp, Homo sapiens
gcatcactcaataccatggtagg

SEQ ID NO: 4800 - DNA, 23 bp, Homo sapiens
aattacaaatccctagacattgg

SEQ ID NO: 4801 - DNA, 23 bp, Homo sapiens
tttcttgcactaaaagatgaggg

SEQ ID NO: 4802 - DNA, 23 bp, Homo sapiens
ggtgacagttttagttcacaggg

SEQ ID NO: 4803 - DNA, 23 bp, Homo sapiens
attccatcagaaaaaatggtggg

SEQ ID NO: 4804 - DNA, 23 bp, Homo sapiens
atgtatacttaggtgtctgtagg

SEQ ID NO: 4805 - DNA, 23 bp, Homo sapiens
tacaaaatcagacccatagaggg

SEQ ID NO: 4806 - DNA, 23 bp, Homo sapiens
tctgaacatgtgtaaagcaaggg

SEQ ID NO: 4807 - DNA, 23 bp, Homo sapiens
acttattattttgtcatacacgg

SEQ ID NO: 4808 - DNA, 23 bp, Homo sapiens
tttactatatatataagttgggg

SEQ ID NO: 4809 - DNA, 23 bp, Homo sapiens
ctagcgagctaaaccaaagaggg

SEQ ID NO: 4810 - DNA, 23 bp, Homo sapiens
gtggctggattcacaaagctggg

SEQ ID NO: 4811 - DNA, 23 bp, Homo sapiens
cgagattctttcctctcaggggg

SEQ ID NO: 4812 - DNA, 23 bp, Homo sapiens
tccagaggcacacactggaatgg

SEQ ID NO: 4813 - DNA, 23 bp, Homo sapiens
ccatatgcctagtctaaggtagg

SEQ ID NO: 4814 - DNA, 23 bp, Homo sapiens
ttcaatcttttccaaagccgagg

SEQ ID NO: 4815 - DNA, 23 bp, Homo sapiens
atacacacacttttttttggggg

SEQ ID NO: 4816 - DNA, 23 bp, Homo sapiens
taaaaaatatcttctatcagagg

SEQ ID NO: 4817 - DNA, 23 bp, Homo sapiens
atgtttttagaaaacatcacagg

SEQ ID NO: 4818 - DNA, 23 bp, Homo sapiens
gacaatgctagttttagtagggg

SEQ ID NO: 4819 - DNA, 23 bp, Homo sapiens
ttccattgaagacattaagacgg

SEQ ID NO: 4820 - DNA, 23 bp, Homo sapiens
tacatagtcactttataagaggg

SEQ ID NO: 4821 - DNA, 23 bp, Homo sapiens
taccttcttggcatcaaacaggg

SEQ ID NO: 4822 - DNA, 23 bp, Homo sapiens
ggttgactgacagtggtctaggg

SEQ ID NO: 4823 - DNA, 23 bp, Homo sapiens
ctgagaaaatcatcagtccaggg

SEQ ID NO: 4824 - DNA, 23 bp, Homo sapiens
aaatatggcccttaaacccaagg

SEQ ID NO: 4825 - DNA, 23 bp, Homo sapiens
aacaatgaaacattttacccagg

SEQ ID NO: 4826 - DNA, 23 bp, Homo sapiens
tgttctgcagcaggttaagtggg

SEQ ID NO: 4827 - DNA, 23 bp, Homo sapiens
cttttatttactcttgtgggtgg

SEQ ID NO: 4828 - DNA, 23 bp, Homo sapiens
gaaaagggagagtgagaacgagg

SEQ ID NO: 4829 - DNA, 23 bp, Homo sapiens
tttactttacctctgacagtagg

SEQ ID NO: 4830 - DNA, 23 bp, Homo sapiens
catttgtctcagagcaatgatgg

SEQ ID NO: 4831 - DNA, 23 bp, Homo sapiens
ttcagtttgtgaatgtcatgtgg

SEQ ID NO: 4832 - DNA, 23 bp, Homo sapiens
caaccttcccatatgtgtggagg

SEQ ID NO: 4833 - DNA, 23 bp, Homo sapiens
tttgtctagtgactgacagaagg

SEQ ID NO: 4834 - DNA, 23 bp, Homo sapiens
gatttgaagaagaatatggaggg

SEQ ID NO: 4835 - DNA, 23 bp, Homo sapiens
ggtttaattttggataagtgggg

SEQ ID NO: 4836 - DNA, 23 bp, Homo sapiens
atctgagaggacgacagctaggg

SEQ ID NO: 4837 - DNA, 23 bp, Homo sapiens
agcagatcagaggcttcagtagg

SEQ ID NO: 4838 - DNA, 23 bp, Homo sapiens
atttaaactaatcttagtggtgg

SEQ ID NO: 4839 - DNA, 23 bp, Homo sapiens
ggcatacaggaattttttggggg

SEQ ID NO: 4840 - DNA, 23 bp, Homo sapiens
gtaggaagtacataagacatagg

SEQ ID NO: 4841 - DNA, 23 bp, Homo sapiens
ccaccaatttaactgtaactcgg

SEQ ID NO: 4842 - DNA, 23 bp, Homo sapiens
tccttatgtgtcagacgaggggg

SEQ ID NO: 4843 - DNA, 23 bp, Homo sapiens
acattatgtaagactagcccagg

SEQ ID NO: 4844 - DNA, 23 bp, Homo sapiens
acccacctattcatttcccaagg

SEQ ID NO: 4845 - DNA, 23 bp, Homo sapiens
aagtacagttctctttctaacgg

SEQ ID NO: 4846 - DNA, 23 bp, Homo sapiens
tttaaagttaattttataggggg

SEQ ID NO: 4847 - DNA, 23 bp, Homo sapiens
ttgtctttctggaaatgaggagg

SEQ ID NO: 4848 - DNA, 23 bp, Homo sapiens
tcacatgatattgcccaaagagg

SEQ ID NO: 4849 - DNA, 23 bp, Homo sapiens
gcatcgttttggagtgtgcatgg

SEQ ID NO: 4850 - DNA, 23 bp, Homo sapiens
agtcctatgagaagcaggcaggg

SEQ ID NO: 4851 - DNA, 23 bp, Homo sapiens
gaaaagtgaagacatttgaaggg

SEQ ID NO: 4852 - DNA, 23 bp, Homo sapiens
ttactttatgtagctactgaggg

SEQ ID NO: 4853 - DNA, 23 bp, Homo sapiens
gtagcagaggtaaattgccatgg

SEQ ID NO: 4854 - DNA, 23 bp, Homo sapiens
cacccctagggtataataggagg

SEQ ID NO: 4855 - DNA, 23 bp, Homo sapiens
agtcctgctagatcaggcatagg

SEQ ID NO: 4856 - DNA, 23 bp, Homo sapiens
tagtgataaatcgaataagttgg

SEQ ID NO: 4857 - DNA, 23 bp, Homo sapiens
ttcctaattcttgatccaagtgg

SEQ ID NO: 4858 - DNA, 23 bp, Homo sapiens
gcatttgagatagccagtgatgg

SEQ ID NO: 4859 - DNA, 23 bp, Homo sapiens
cctttaaatgaagatcacattgg

SEQ ID NO: 4860 - DNA, 23 bp, Homo sapiens
ctaaaatgtgagcccatcaaagg

SEQ ID NO: 4861 - DNA, 23 bp, Homo sapiens
tgagttggtaaacaaccttaagg

SEQ ID NO: 4862 - DNA, 23 bp, Homo sapiens
tggagcctagacagagacattgg

SEQ ID NO: 4863 - DNA, 23 bp, Homo sapiens
taaagtgaaccaaatcaaagtgg

SEQ ID NO: 4864 - DNA, 23 bp, Homo sapiens
gctaaggcctggaagcctcaagg

SEQ ID NO: 4865 - DNA, 23 bp, Homo sapiens
gctcttgtggttacaacaagagg

SEQ ID NO: 4866 - DNA, 23 bp, Homo sapiens
tctaccctgatttttggaggagg

SEQ ID NO: 4867 - DNA, 23 bp, Homo sapiens
aagaaacccagcaagctgaaagg

SEQ ID NO: 4868 - DNA, 23 bp, Homo sapiens
aatataacctcaattgcaagagg

SEQ ID NO: 4869 - DNA, 23 bp, Homo sapiens
tgccagttccctgtgctaagagg

SEQ ID NO: 4870 - DNA, 23 bp, Homo sapiens
aggttgtttaccaactcagtagg

SEQ ID NO: 4871 - DNA, 23 bp, Homo sapiens
tttccttatgtgtcagacgaggg

SEQ ID NO: 4872 - DNA, 23 bp, Homo sapiens
gggattctgaagaagttcctggg

SEQ ID NO: 4873 - DNA, 23 bp, Homo sapiens
cctaaactttggtgtgcaggagg

SEQ ID NO: 4874 - DNA, 23 bp, Homo sapiens
ccatggggtaggatggttcgagg

SEQ ID NO: 4875 - DNA, 23 bp, Homo sapiens
cttactttatgtagctactgagg

SEQ ID NO: 4876 - DNA, 23 bp, Homo sapiens
agttaatatcaaattctatgagg

SEQ ID NO: 4877 - DNA, 23 bp, Homo sapiens
tacttttagtgtcaacaaagagg

SEQ ID NO: 4878 - DNA, 23 bp, Homo sapiens
tttcatggaacaaaaagtcacgg

SEQ ID NO: 4879 - DNA, 23 bp, Homo sapiens
ccaaaggactgaaacttgaaagg

SEQ ID NO: 4880 - DNA, 23 bp, Homo sapiens
ttaggattagcttatcccaaagg

SEQ ID NO: 4881 - DNA, 23 bp, Homo sapiens
aaaaatgtcttcgatctacaagg

SEQ ID NO: 4882 - DNA, 23 bp, Homo sapiens
tgtgtaatcatgggtagtgttgg

SEQ ID NO: 4883 - DNA, 23 bp, Homo sapiens
cagctagtaatgtaaaatggtgg

SEQ ID NO: 4884 - DNA, 23 bp, Homo sapiens
acattaatatcatcatcaaacgg

SEQ ID NO: 4885 - DNA, 23 bp, Homo sapiens
gaagcacgaatataaaacaaagg

SEQ ID NO: 4886 - DNA, 23 bp, Homo sapiens
taggaataagtaattctgatggg

SEQ ID NO: 4887 - DNA, 23 bp, Homo sapiens
ctgactgacataataactgcagg

SEQ ID NO: 4888 - DNA, 23 bp, Homo sapiens
ctatctcgtaaataagagctggg

SEQ ID NO: 4889 - DNA, 23 bp, Homo sapiens
atcatagattctttgctaagggg

SEQ ID NO: 4890 - DNA, 23 bp, Homo sapiens
attatacacagaaaagctgcagg

SEQ ID NO: 4891 - DNA, 23 bp, Homo sapiens
attgttatatcatttgacatcgg

SEQ ID NO: 4892 - DNA, 23 bp, Homo sapiens
gtgtgtacatatatgggtggtgg

SEQ ID NO: 4893 - DNA, 23 bp, Homo sapiens
gcttggctagggttgtattgggg

SEQ ID NO: 4894 - DNA, 23 bp, Homo sapiens
aaggaactggcacttttcagtgg

SEQ ID NO: 4895 - DNA, 23 bp, Homo sapiens
ttctgatgaccctagatccaggg

SEQ ID NO: 4896 - DNA, 23 bp, Homo sapiens
aacttgatttccattaacgatgg

SEQ ID NO: 4897 - DNA, 23 bp, Homo sapiens
caggagcagagccttgagatggg

SEQ ID NO: 4898 - DNA, 23 bp, Homo sapiens
tttattttcagataaagcacagg

SEQ ID NO: 4899 - DNA, 23 bp, Homo sapiens
aaaaagctagtaaatggaagggg

SEQ ID NO: 4900 - DNA, 23 bp, Homo sapiens
gatccttgcacaaacaagccagg

SEQ ID NO: 4901 - DNA, 23 bp, Homo sapiens
tggttttgtctgggaatcggtgg

SEQ ID NO: 4902 - DNA, 23 bp, Homo sapiens
ctatagagtaagttgcaggcagg

SEQ ID NO: 4903 - DNA, 23 bp, Homo sapiens
aaatactgaaagatgtagatggg

SEQ ID NO: 4904 - DNA, 23 bp, Homo sapiens
cttttaacctgaaaatccaaagg

SEQ ID NO: 4905 - DNA, 23 bp, Homo sapiens
attcagtgtcaggacaaagatgg

SEQ ID NO: 4906 - DNA, 23 bp, Homo sapiens
agtgtctccagtgccagagaggg

SEQ ID NO: 4907 - DNA, 23 bp, Homo sapiens
ttggtcttgcaaagggtcaaggg

SEQ ID NO: 4908 - DNA, 23 bp, Homo sapiens
ctaggctgaaggatgatagtggg

SEQ ID NO: 4909 - DNA, 23 bp, Homo sapiens
gatgacttcccagtaggtggagg

SEQ ID NO: 4910 - DNA, 23 bp, Homo sapiens
ataaaacttgttgaatcactcgg

SEQ ID NO: 4911 - DNA, 23 bp, Homo sapiens
atattttctcactctttcagagg

SEQ ID NO: 4912 - DNA, 23 bp, Homo sapiens
caaagtggtaatttgccagtagg

SEQ ID NO: 4913 - DNA, 23 bp, Homo sapiens
agaggaggcgaggtagaggaagg

SEQ ID NO: 4914 - DNA, 23 bp, Homo sapiens
cactgcctttcagtacctacggg

SEQ ID NO: 4915 - DNA, 23 bp, Homo sapiens
ccattttagtgatttctggaagg

SEQ ID NO: 4916 - DNA, 23 bp, Homo sapiens
attgctagtccccacttacaagg

SEQ ID NO: 4917 - DNA, 23 bp, Homo sapiens
ggaaattcaagaagggatgacgg

SEQ ID NO: 4918 - DNA, 23 bp, Homo sapiens
acaactatgaaaaagagcattgg

SEQ ID NO: 4919 - DNA, 23 bp, Homo sapiens
agtgtccttacactattcgaagg

SEQ ID NO: 4920 - DNA, 23 bp, Homo sapiens
atgaaaagagtggtgaggtaggg

SEQ ID NO: 4921 - DNA, 23 bp, Homo sapiens
tgtttactatcccaaagttgggg

SEQ ID NO: 4922 - DNA, 23 bp, Homo sapiens
ccatatcagaaaataaatgaagg

SEQ ID NO: 4923 - DNA, 23 bp, Homo sapiens
aataaataaaaagtaaacctagg

SEQ ID NO: 4924 - DNA, 23 bp, Homo sapiens
gttaaaatcagtcacttcagagg

SEQ ID NO: 4925 - DNA, 23 bp, Homo sapiens
ctgcatgtagatccttatgtggg

SEQ ID NO: 4926 - DNA, 23 bp, Homo sapiens
ttcatcactatcatagagatggg

SEQ ID NO: 4927 - DNA, 23 bp, Homo sapiens
tgcttgtgtaattaactccatgg

SEQ ID NO: 4928 - DNA, 23 bp, Homo sapiens
cattattcagatcattgcaaagg

SEQ ID NO: 4929 - DNA, 23 bp, Homo sapiens
tgtccaggtgaaagaaatgccgg

SEQ ID NO: 4930 - DNA, 23 bp, Homo sapiens
aatctctttcccttcaagagagg

SEQ ID NO: 4931 - DNA, 23 bp, Homo sapiens
ccaattatagctatctagctcgg

SEQ ID NO: 4932 - DNA, 23 bp, Homo sapiens
tgcttgtgatcaagaatggatgg

SEQ ID NO: 4933 - DNA, 23 bp, Homo sapiens
ttctggctgtgagaggcataggg

SEQ ID NO: 4934 - DNA, 23 bp, Homo sapiens
gattttgtttagaagtagcaagg

SEQ ID NO: 4935 - DNA, 23 bp, Homo sapiens
tttggtagagataggcagtaggg

SEQ ID NO: 4936 - DNA, 23 bp, Homo sapiens
gaaaatgtgttacagtaaggagg

SEQ ID NO: 4937 - DNA, 23 bp, Homo sapiens
tgatttgaagaagaatatggagg

SEQ ID NO: 4938 - DNA, 23 bp, Homo sapiens
tgcaaaagtaaagaaaaagtggg

SEQ ID NO: 4939 - DNA, 23 bp, Homo sapiens
cttaaaatattgaaatagcgagg

SEQ ID NO: 4940 - DNA, 23 bp, Homo sapiens
gctaaaatatatgtgactgtagg

SEQ ID NO: 4941 - DNA, 23 bp, Homo sapiens
gtttccttaaagccctctgaggg

SEQ ID NO: 4942 - DNA, 23 bp, Homo sapiens
gtgtgatccatggggtaggatgg

SEQ ID NO: 4943 - DNA, 23 bp, Homo sapiens
agaggtttgagattcacaaaagg

SEQ ID NO: 4944 - DNA, 23 bp, Homo sapiens
cgtaattgtttcccttgaggggg

SEQ ID NO: 4945 - DNA, 23 bp, Homo sapiens
cagtgttaggaaattcaagaagg

SEQ ID NO: 4946 - DNA, 23 bp, Homo sapiens
tcttcatcaacagtttggaaagg

SEQ ID NO: 4947 - DNA, 23 bp, Homo sapiens
tgtcaccaccaacgatgactggg

SEQ ID NO: 4948 - DNA, 23 bp, Homo sapiens
taccacccagggaatacagcagg

SEQ ID NO: 4949 - DNA, 23 bp, Homo sapiens
ttgttactagaactaaaatgagg

SEQ ID NO: 4950 - DNA, 23 bp, Homo sapiens
tcaaatcaaaaaacgtagaacgg

SEQ ID NO: 4951 - DNA, 23 bp, Homo sapiens
ataaagacaatatttcctatggg

SEQ ID NO: 4952 - DNA, 23 bp, Homo sapiens
caatctagatagtatttccgtgg

SEQ ID NO: 4953 - DNA, 23 bp, Homo sapiens
tttgagattggatctcctagtgg

SEQ ID NO: 4954 - DNA, 23 bp, Homo sapiens
catgtatcattagggagtagagg

SEQ ID NO: 4955 - DNA, 23 bp, Homo sapiens
aaacaatctaaaacttgcaatgg

SEQ ID NO: 4956 - DNA, 23 bp, Homo sapiens
ctaaaactggtgaatgcagatgg

SEQ ID NO: 4957 - DNA, 23 bp, Homo sapiens
ggacttctaacttaagacaatgg

SEQ ID NO: 4958 - DNA, 23 bp, Homo sapiens
ttttaggaacttctgggctgggg

SEQ ID NO: 4959 - DNA, 23 bp, Homo sapiens
gtaatccactgaaggaactcagg

SEQ ID NO: 4960 - DNA, 23 bp, Homo sapiens
attacatagaagcattagaaagg

SEQ ID NO: 4961 - DNA, 23 bp, Homo sapiens
gataaggactctgaaatgcaagg

SEQ ID NO: 4962 - DNA, 23 bp, Homo sapiens
tccccatacttaagatcaagtgg

SEQ ID NO: 4963 - DNA, 23 bp, Homo sapiens
agatgtttattttaggactgtgg

SEQ ID NO: 4964 - DNA, 23 bp, Homo sapiens
cattaaatgtaaataatccgtgg

SEQ ID NO: 4965 - DNA, 23 bp, Homo sapiens
caccaaatacaggcagtcacagg

SEQ ID NO: 4966 - DNA, 23 bp, Homo sapiens
tataaaggaaatgggttcagtgg

SEQ ID NO: 4967 - DNA, 23 bp, Homo sapiens
tctaaagaagatggatcaccagg

SEQ ID NO: 4968 - DNA, 23 bp, Homo sapiens
ttggatttcatgccatggcaagg

SEQ ID NO: 4969 - DNA, 23 bp, Homo sapiens
gttctattttggagagaaggagg

SEQ ID NO: 4970 - DNA, 23 bp, Homo sapiens
tatggccatataaatttcaaagg

SEQ ID NO: 4971 - DNA, 23 bp, Homo sapiens
ctaagctccctctggaatggagg

SEQ ID NO: 4972 - DNA, 23 bp, Homo sapiens
aagaactcttgggccagtgtagg

SEQ ID NO: 4973 - DNA, 23 bp, Homo sapiens
ataggtttggtggacaaactagg

SEQ ID NO: 4974 - DNA, 23 bp, Homo sapiens
tagacagaggtttccctccacgg

SEQ ID NO: 4975 - DNA, 23 bp, Homo sapiens
tgttactccatagtcaatgatgg

SEQ ID NO: 4976 - DNA, 23 bp, Homo sapiens
gcatgagcttcatactcacttgg

SEQ ID NO: 4977 - DNA, 23 bp, Homo sapiens
gtttctgaactagcagtgcccgg

SEQ ID NO: 4978 - DNA, 23 bp, Homo sapiens
ggagatggttttgagtactcagg

SEQ ID NO: 4979 - DNA, 23 bp, Homo sapiens
tcttacactagtacccttcaggg

SEQ ID NO: 4980 - DNA, 23 bp, Homo sapiens
tgctacagaagtataaatgatgg

SEQ ID NO: 4981 - DNA, 23 bp, Homo sapiens
aataccttccgtcattccaatgg

SEQ ID NO: 4982 - DNA, 23 bp, Homo sapiens
cctactgttaagacacaggatgg

SEQ ID NO: 4983 - DNA, 23 bp, Homo sapiens
aattctacagtaactggggttgg

SEQ ID NO: 4984 - DNA, 23 bp, Homo sapiens
atgattagaatagggaacctagg

SEQ ID NO: 4985 - DNA, 23 bp, Homo sapiens
cttaacaccccgttgaccaaagg

SEQ ID NO: 4986 - DNA, 23 bp, Homo sapiens
gatatttgaaacaacaagcaagg

SEQ ID NO: 4987 - DNA, 23 bp, Homo sapiens
attgtaacctaaactgcctgtgg

SEQ ID NO: 4988 - DNA, 23 bp, Homo sapiens
attttgctcctggccaaaggagg

SEQ ID NO: 4989 - DNA, 23 bp, Homo sapiens
ggccctttcatatctctgtacgg

SEQ ID NO: 4990 - DNA, 23 bp, Homo sapiens
attgcagtgaaagaaatttgcgg

SEQ ID NO: 4991 - DNA, 23 bp, Homo sapiens
aggtgtgatctaaccagcatagg

SEQ ID NO: 4992 - DNA, 23 bp, Homo sapiens
ttattacaagtcactctttgggg

SEQ ID NO: 4993 - DNA, 23 bp, Homo sapiens
tgactgtaggaatcctctgttgg

SEQ ID NO: 4994 - DNA, 23 bp, Homo sapiens
tccctcttgattacacccctagg

SEQ ID NO: 4995 - DNA, 23 bp, Homo sapiens
gtatttccgtgggggtaatgagg

SEQ ID NO: 4996 - DNA, 23 bp, Homo sapiens
gctggggaaatgtggcctgaagg

SEQ ID NO: 4997 - DNA, 23 bp, Homo sapiens
ttcttacagctccttcacattgg

SEQ ID NO: 4998 - DNA, 23 bp, Homo sapiens
gcttactttagagcagtcacagg

SEQ ID NO: 4999 - DNA, 23 bp, Homo sapiens
ctatatgcagaatcgtgtatggg

SEQ ID NO: 5000 - DNA, 23 bp, Homo sapiens
tttgatgttatgtacttaggagg

SEQ ID NO: 5001 - DNA, 23 bp, Homo sapiens
attaggaatgcaatatatggagg

SEQ ID NO: 5002 - DNA, 23 bp, Homo sapiens
tgtccctgatgctggaaaagtgg

SEQ ID NO: 5003 - DNA, 23 bp, Homo sapiens
aatttgtgtttcaaaaaactggg

SEQ ID NO: 5004 - DNA, 23 bp, Homo sapiens
gaataggatggtttgtaaagggg

SEQ ID NO: 5005 - DNA, 23 bp, Homo sapiens
tgaagatctaaagtgaagccagg

SEQ ID NO: 5006 - DNA, 23 bp, Homo sapiens
ctgtaggtcctcaggacacatgg

SEQ ID NO: 5007 - DNA, 23 bp, Homo sapiens
gcatgaactggccatgaacatgg

SEQ ID NO: 5008 - DNA, 23 bp, Homo sapiens
aagaggtaggtcattcagccagg

SEQ ID NO: 5009 - DNA, 23 bp, Homo sapiens
tcttcgatctacaaggtctacgg

SEQ ID NO: 5010 - DNA, 23 bp, Homo sapiens
tcttatgcctagatgtacatagg

SEQ ID NO: 5011 - DNA, 23 bp, Homo sapiens
ggaaaggccagtctattgacagg

SEQ ID NO: 5012 - DNA, 23 bp, Homo sapiens
ttattgtttgctccatacaaagg

SEQ ID NO: 5013 - DNA, 23 bp, Homo sapiens
cagaagttcctaaaatcttgtgg

SEQ ID NO: 5014 - DNA, 23 bp, Homo sapiens
acttttagtgtcaacaaagaggg

SEQ ID NO: 5015 - DNA, 23 bp, Homo sapiens
ttatatgttttgttacaagtagg

SEQ ID NO: 5016 - DNA, 23 bp, Homo sapiens
gtgaaaagtaatacttcctaggg

SEQ ID NO: 5017 - DNA, 23 bp, Homo sapiens
gggcattttgtgcaatgctgagg

SEQ ID NO: 5018 - DNA, 23 bp, Homo sapiens
ataaacgtatttttcccttgagg

SEQ ID NO: 5019 - DNA, 23 bp, Homo sapiens
catgtagtctctaaaggcacagg

SEQ ID NO: 5020 - DNA, 23 bp, Homo sapiens
tgcgagttacacacatcgactgg

SEQ ID NO: 5021 - DNA, 23 bp, Homo sapiens
caactacaccgaatctcacatgg

SEQ ID NO: 5022 - DNA, 23 bp, Homo sapiens
acaccccatcaacaataaagtgg

SEQ ID NO: 5023 - DNA, 23 bp, Homo sapiens
cagtagttgtggcaacctatggg

SEQ ID NO: 5024 - DNA, 23 bp, Homo sapiens
ataaatgcagtaaaaagcctagg

SEQ ID NO: 5025 - DNA, 23 bp, Homo sapiens
gtgatcattcatttaaacctcgg

SEQ ID NO: 5026 - DNA, 23 bp, Homo sapiens
catctttgaaaaattcaagaggg

SEQ ID NO: 5027 - DNA, 23 bp, Homo sapiens
ttcttcctgattacatccagtgg

SEQ ID NO: 5028 - DNA, 23 bp, Homo sapiens
atggatttgaaaggacaagaggg

SEQ ID NO: 5029 - DNA, 23 bp, Homo sapiens
tctagacatataattttaagggg

SEQ ID NO: 5030 - DNA, 23 bp, Homo sapiens
tttccatttgaatatcccacagg

SEQ ID NO: 5031 - DNA, 23 bp, Homo sapiens
ctaaaagacacactactgatggg

SEQ ID NO: 5032 - DNA, 23 bp, Homo sapiens
attgcaggttggaggagggtggg

SEQ ID NO: 5033 - DNA, 23 bp, Homo sapiens
tgccttttccaggttttctgagg

SEQ ID NO: 5034 - DNA, 23 bp, Homo sapiens
aattaatctgccgaagatgacgg

SEQ ID NO: 5035 - DNA, 23 bp, Homo sapiens
ggcacacactggaatggcaccgg

SEQ ID NO: 5036 - DNA, 23 bp, Homo sapiens
actggaagagatatacaagatgg

SEQ ID NO: 5037 - DNA, 23 bp, Homo sapiens
tttaaaatattctgtagccaagg

SEQ ID NO: 5038 - DNA, 23 bp, Homo sapiens
ttgctcggacagagtctgtaggg

SEQ ID NO: 5039 - DNA, 23 bp, Homo sapiens
gactggggatacaatgtggatgg

SEQ ID NO: 5040 - DNA, 23 bp, Homo sapiens
aagtctcccacacatgatgcagg

SEQ ID NO: 5041 - DNA, 23 bp, Homo sapiens
atagccagtgatggaaatgaagg

SEQ ID NO: 5042 - DNA, 23 bp, Homo sapiens
tagtaaggatggataaggagtgg

SEQ ID NO: 5043 - DNA, 23 bp, Homo sapiens
tattagacacaaaaattggaagg

SEQ ID NO: 5044 - DNA, 23 bp, Homo sapiens
cctccaagcatatcaagtacagg

SEQ ID NO: 5045 - DNA, 23 bp, Homo sapiens
ggaattttctttagctggcaggg

SEQ ID NO: 5046 - DNA, 23 bp, Homo sapiens
tattttcaatgattttccatggg

SEQ ID NO: 5047 - DNA, 23 bp, Homo sapiens
caaactatgacgcgagaggatgg

SEQ ID NO: 5048 - DNA, 23 bp, Homo sapiens
gtaggtagtatgttatcctcagg

SEQ ID NO: 5049 - DNA, 23 bp, Homo sapiens
tgacgcttcttgcaggcagaagg

SEQ ID NO: 5050 - DNA, 23 bp, Homo sapiens
gtttactgaaaggcatacctagg

SEQ ID NO: 5051 - DNA, 23 bp, Homo sapiens
ccctcttgattacacccctaggg

SEQ ID NO: 5052 - DNA, 23 bp, Homo sapiens
ccagttaccataaaaagacatgg

SEQ ID NO: 5053 - DNA, 23 bp, Homo sapiens
ttttacctgagttccttcagtgg

SEQ ID NO: 5054 - DNA, 23 bp, Homo sapiens
tagagatataataagtggaaggg

SEQ ID NO: 5055 - DNA, 23 bp, Homo sapiens
tcagacactcccattccaatggg

SEQ ID NO: 5056 - DNA, 23 bp, Homo sapiens
tgaaaaggatgcgggaaaggtgg

SEQ ID NO: 5057 - DNA, 23 bp, Homo sapiens
aattagaattgtctttcagaggg

SEQ ID NO: 5058 - DNA, 23 bp, Homo sapiens
ctcaataccatggtaggaggagg

SEQ ID NO: 5059 - DNA, 23 bp, Homo sapiens
catctcttaactacagtgccagg

SEQ ID NO: 5060 - DNA, 23 bp, Homo sapiens
gccaccacaacagagaaggttgg

SEQ ID NO: 5061 - DNA, 23 bp, Homo sapiens
ttattttgtaaagctacggaagg

SEQ ID NO: 5062 - DNA, 23 bp, Homo sapiens
gtttcctgaaccaggaacatagg

SEQ ID NO: 5063 - DNA, 23 bp, Homo sapiens
aacaatatataaatagaggatgg

SEQ ID NO: 5064 - DNA, 23 bp, Homo sapiens
ttctaccctgctacttgtagagg

SEQ ID NO: 5065 - DNA, 23 bp, Homo sapiens
acctgatttattcaaagaggagg

SEQ ID NO: 5066 - DNA, 23 bp, Homo sapiens
attaaaataaccaatcctctagg

SEQ ID NO: 5067 - DNA, 23 bp, Homo sapiens
gcaacctatgggattaagtaggg

SEQ ID NO: 5068 - DNA, 23 bp, Homo sapiens
tcatagcataccaattaagcagg

SEQ ID NO: 5069 - DNA, 23 bp, Homo sapiens
ttataggaagaaagttatgaagg

SEQ ID NO: 5070 - DNA, 23 bp, Homo sapiens
gtcagacactcccattccaatgg

SEQ ID NO: 5071 - DNA, 23 bp, Homo sapiens
caaagtttatatgtgatccaagg

SEQ ID NO: 5072 - DNA, 23 bp, Homo sapiens
acagcccactcctagcccatggg

SEQ ID NO: 5073 - DNA, 23 bp, Homo sapiens
cgtagctttacaaaataacaagg

SEQ ID NO: 5074 - DNA, 23 bp, Homo sapiens
gaccgtacagagatatgaaaggg

SEQ ID NO: 5075 - DNA, 23 bp, Homo sapiens
ggactgcaaagcactcaagcagg

SEQ ID NO: 5076 - DNA, 23 bp, Homo sapiens
aagcttacggcaaggatgcaggg

SEQ ID NO: 5077 - DNA, 23 bp, Homo sapiens
atattgtgatttaagggcgtagg

SEQ ID NO: 5078 - DNA, 23 bp, Homo sapiens
ccaataaatcaacctacagtagg

SEQ ID NO: 5079 - DNA, 23 bp, Homo sapiens
ttttcaactggtagttggggagg

SEQ ID NO: 5080 - DNA, 23 bp, Homo sapiens
agcctactaaagagaatgaaagg

SEQ ID NO: 5081 - DNA, 23 bp, Homo sapiens
tattgccacggaagaaggctggg

SEQ ID NO: 5082 - DNA, 23 bp, Homo sapiens
cgagttacagttaaattggtggg

SEQ ID NO: 5083 - DNA, 23 bp, Homo sapiens
caatatttaagaaaaaacttagg

SEQ ID NO: 5084 - DNA, 23 bp, Homo sapiens
taacaacaattagttaaaagcgg

SEQ ID NO: 5085 - DNA, 23 bp, Homo sapiens
tcaccagagatagaaatatgagg

SEQ ID NO: 5086 - DNA, 23 bp, Homo sapiens
taacatatcaataaattacatgg

SEQ ID NO: 5087 - DNA, 23 bp, Homo sapiens
tattaatccatccctggcatagg

SEQ ID NO: 5088 - DNA, 23 bp, Homo sapiens
atagctttagttttcaaaagggg

SEQ ID NO: 5089 - DNA, 23 bp, Homo sapiens
aagcacgaatataaaacaaaggg

SEQ ID NO: 5090 - DNA, 23 bp, Homo sapiens
caccaacttatctattgcaaggg

SEQ ID NO: 5091 - DNA, 23 bp, Homo sapiens
catctatctctttaggaccaggg

SEQ ID NO: 5092 - DNA, 23 bp, Homo sapiens
tcctccttctctcttactggggg

SEQ ID NO: 5093 - DNA, 23 bp, Homo sapiens
attaaatgtaaataatccgtggg

SEQ ID NO: 5094 - DNA, 23 bp, Homo sapiens
gtggtgataaacagcattggagg

SEQ ID NO: 5095 - DNA, 23 bp, Homo sapiens
gctgttgagtgacagttaagtgg

SEQ ID NO: 5096 - DNA, 23 bp, Homo sapiens
ccaaggaacaaggtccctatggg

SEQ ID NO: 5097 - DNA, 23 bp, Homo sapiens
gactggatcccagtcatcgttgg

SEQ ID NO: 5098 - DNA, 23 bp, Homo sapiens
cattttaaaactcttagtggtgg

SEQ ID NO: 5099 - DNA, 23 bp, Homo sapiens
tgatagataaatgtaaagctggg

SEQ ID NO: 5100 - DNA, 23 bp, Homo sapiens
gtctagatttggagagacaaggg

SEQ ID NO: 5101 - DNA, 23 bp, Homo sapiens
agtagaaaaattcttcccatggg

SEQ ID NO: 5102 - DNA, 23 bp, Homo sapiens
agggtactctttaaatctagtgg

SEQ ID NO: 5103 - DNA, 23 bp, Homo sapiens
gaagactacaagccatatgatgg

SEQ ID NO: 5104 - DNA, 23 bp, Homo sapiens
tatttttcatctttatgcgatgg

SEQ ID NO: 5105 - DNA, 23 bp, Homo sapiens
tggtgaactctggtcttccatgg

SEQ ID NO: 5106 - DNA, 23 bp, Homo sapiens
agtgagaacgaggatgagggagg

SEQ ID NO: 5107 - DNA, 23 bp, Homo sapiens
gtagctgatagaggtgagaaagg

SEQ ID NO: 5108 - DNA, 23 bp, Homo sapiens
agatggattttaccttgccatgg

SEQ ID NO: 5109 - DNA, 23 bp, Homo sapiens
acttggtcacactatataagtgg

SEQ ID NO: 5110 - DNA, 23 bp, Homo sapiens
aatctgttaaatagaaacatagg

SEQ ID NO: 5111 - DNA, 23 bp, Homo sapiens
aatttgctgtgataaacagtggg

SEQ ID NO: 5112 - DNA, 23 bp, Homo sapiens
aaagtaaacttaaaattaggagg

SEQ ID NO: 5113 - DNA, 23 bp, Homo sapiens
tggaccctacttaatcccatagg

SEQ ID NO: 5114 - DNA, 23 bp, Homo sapiens
agagcagtgtgtaaaaggattgg

SEQ ID NO: 5115 - DNA, 23 bp, Homo sapiens
tgtccttatagcttcttggtggg

SEQ ID NO: 5116 - DNA, 23 bp, Homo sapiens
aaatcagtctaaatactgccagg

SEQ ID NO: 5117 - DNA, 23 bp, Homo sapiens
ggatggataaggagtgggagtgg

SEQ ID NO: 5118 - DNA, 23 bp, Homo sapiens
gcctagtcccaatttctggtggg

SEQ ID NO: 5119 - DNA, 23 bp, Homo sapiens
gtttagctcgctagctaacaggg

SEQ ID NO: 5120 - DNA, 23 bp, Homo sapiens
ttgtactatgaaggatacttggg

SEQ ID NO: 5121 - DNA, 23 bp, Homo sapiens
tacagaataagaaagcactaggg

SEQ ID NO: 5122 - DNA, 23 bp, Homo sapiens
ccacaattaagaaaagatgatgg

SEQ ID NO: 5123 - DNA, 23 bp, Homo sapiens
agttacaatgagttcttcaaggg

SEQ ID NO: 5124 - DNA, 23 bp, Homo sapiens
gcactgcctttcagtacctacgg

SEQ ID NO: 5125 - DNA, 23 bp, Homo sapiens
tactagatattactcactcaggg

SEQ ID NO: 5126 - DNA, 23 bp, Homo sapiens
ctgctttgctcaaatgtcagggg

SEQ ID NO: 5127 - DNA, 23 bp, Homo sapiens
agtttgagctgcagcacccgtgg

SEQ ID NO: 5128 - DNA, 23 bp, Homo sapiens
tagcacagatacaattaagcagg

SEQ ID NO: 5129 - DNA, 23 bp, Homo sapiens
agagatagaaatatgaggcatgg

SEQ ID NO: 5130 - DNA, 23 bp, Homo sapiens
tcccaaagttggggggacatggg

SEQ ID NO: 5131 - DNA, 23 bp, Homo sapiens
gctgaagctgacgctgacacggg

SEQ ID NO: 5132 - DNA, 23 bp, Homo sapiens
aaaaaaatgtcaacgaagcaggg

SEQ ID NO: 5133 - DNA, 23 bp, Homo sapiens
tttgacaacgtgtctcaagaagg

SEQ ID NO: 5134 - DNA, 23 bp, Homo sapiens
tttaaatttaaggttcaaagagg

SEQ ID NO: 5135 - DNA, 23 bp, Homo sapiens
tccctgccagaacaagcaaaagg

SEQ ID NO: 5136 - DNA, 23 bp, Homo sapiens
tcttggcaggaaacaattgatgg

SEQ ID NO: 5137 - DNA, 23 bp, Homo sapiens
ttcctttatccagttatctgagg

SEQ ID NO: 5138 - DNA, 23 bp, Homo sapiens
tcagaactaaagtttttgaaggg

SEQ ID NO: 5139 - DNA, 23 bp, Homo sapiens
tgacatctgaatctatgaaaggg

SEQ ID NO: 5140 - DNA, 23 bp, Homo sapiens
atgctcttgccagatttgtaggg

SEQ ID NO: 5141 - DNA, 23 bp, Homo sapiens
ttaaaaggtacctacccataggg

SEQ ID NO: 5142 - DNA, 23 bp, Homo sapiens
tctcatatagaagctattgtggg

SEQ ID NO: 5143 - DNA, 23 bp, Homo sapiens
tgggagcaggttggagaagaggg

SEQ ID NO: 5144 - DNA, 23 bp, Homo sapiens
gtatctctacttcgtctactggg

SEQ ID NO: 5145 - DNA, 23 bp, Homo sapiens
ttaaatgaagatcacattggagg

SEQ ID NO: 5146 - DNA, 23 bp, Homo sapiens
tatcctgtcacattacacttagg

SEQ ID NO: 5147 - DNA, 23 bp, Homo sapiens
cctgtcagtattgaccccttggg

SEQ ID NO: 5148 - DNA, 23 bp, Homo sapiens
atacagattaaagaaccaaaagg

SEQ ID NO: 5149 - DNA, 23 bp, Homo sapiens
ggtgtatgttgaagatgaaaggg

SEQ ID NO: 5150 - DNA, 23 bp, Homo sapiens
atatcccaaaacctccattacgg

SEQ ID NO: 5151 - DNA, 23 bp, Homo sapiens
attgatgtacaagcccgaaaagg

SEQ ID NO: 5152 - DNA, 23 bp, Homo sapiens
tgactggtatattccaagaatgg

SEQ ID NO: 5153 - DNA, 23 bp, Homo sapiens
aggatatgcccctttatgatggg

SEQ ID NO: 5154 - DNA, 23 bp, Homo sapiens
ggcttggtttgtggtcaagatgg

SEQ ID NO: 5155 - DNA, 23 bp, Homo sapiens
tgtctagaaaagcttttgctcgg

SEQ ID NO: 5156 - DNA, 23 bp, Homo sapiens
ttagagatataataagtggaagg

SEQ ID NO: 5157 - DNA, 23 bp, Homo sapiens
gttgtctaaccttttggcaaggg

SEQ ID NO: 5158 - DNA, 23 bp, Homo sapiens
atcaagtcggtacactcggatgg

SEQ ID NO: 5159 - DNA, 23 bp, Homo sapiens
actgctctaaagtaagctaaagg

SEQ ID NO: 5160 - DNA, 23 bp, Homo sapiens
ggttgtctaaccttttggcaagg

SEQ ID NO: 5161 - DNA, 23 bp, Homo sapiens
ttagtaccatagttatactcagg

SEQ ID NO: 5162 - DNA, 23 bp, Homo sapiens
tcatcttgagacaagagctcagg

SEQ ID NO: 5163 - DNA, 23 bp, Homo sapiens
catttgtgaaggtgtttaagtgg

SEQ ID NO: 5164 - DNA, 23 bp, Homo sapiens
tattatgtgtatagtatggatgg

SEQ ID NO: 5165 - DNA, 23 bp, Homo sapiens
gccacgtgacacagaaatgaagg

SEQ ID NO: 5166 - DNA, 23 bp, Homo sapiens
tcccacttgatcttaagtatggg

SEQ ID NO: 5167 - DNA, 23 bp, Homo sapiens
agcagttgcaaagtaaagaatgg

SEQ ID NO: 5168 - DNA, 23 bp, Homo sapiens
tgccatggctgtttgttagaggg

SEQ ID NO: 5169 - DNA, 23 bp, Homo sapiens
atctagtgtttgattgaggacgg

SEQ ID NO: 5170 - DNA, 23 bp, Homo sapiens
gcaaaaaattgaaaaggatgcgg

SEQ ID NO: 5171 - DNA, 23 bp, Homo sapiens
attcaatcagtagataagcttgg

SEQ ID NO: 5172 - DNA, 23 bp, Homo sapiens
gtagtttgacatgaccgtaatgg

SEQ ID NO: 5173 - DNA, 23 bp, Homo sapiens
cttggcctatctcagggtacagg

SEQ ID NO: 5174 - DNA, 23 bp, Homo sapiens
tattgtgatttaagggcgtaggg

SEQ ID NO: 5175 - DNA, 23 bp, Homo sapiens
gagatagaaatatgaggcatggg

SEQ ID NO: 5176 - DNA, 23 bp, Homo sapiens
aattgcatagcaatcaaaaaggg

SEQ ID NO: 5177 - DNA, 23 bp, Homo sapiens
gaaaagaacagaatgtccttggg

SEQ ID NO: 5178 - DNA, 23 bp, Homo sapiens
tttagctctgtgctaatgaaagg

SEQ ID NO: 5179 - DNA, 23 bp, Homo sapiens
tcaaatatggtcctgcacacagg

SEQ ID NO: 5180 - DNA, 23 bp, Homo sapiens
cagacttcaactttctaccctgg

SEQ ID NO: 5181 - DNA, 23 bp, Homo sapiens
agaagacttataaaagaccttgg

SEQ ID NO: 5182 - DNA, 23 bp, Homo sapiens
ctaggaactggagaatatatggg

SEQ ID NO: 5183 - DNA, 23 bp, Homo sapiens
taagaagaggtgtagtagagagg

SEQ ID NO: 5184 - DNA, 23 bp, Homo sapiens
caaggcagctatatagcaaaggg

SEQ ID NO: 5185 - DNA, 23 bp, Homo sapiens
ttctagatcagctttaacaatgg

SEQ ID NO: 5186 - DNA, 23 bp, Homo sapiens
acacacacctccacacatatggg

SEQ ID NO: 5187 - DNA, 23 bp, Homo sapiens
tgaaactgtaacagttgtaaggg

SEQ ID NO: 5188 - DNA, 23 bp, Homo sapiens
aaagtttgtctaggatgccatgg

SEQ ID NO: 5189 - DNA, 23 bp, Homo sapiens
caccatgtctttgttgcaggtgg

SEQ ID NO: 5190 - DNA, 23 bp, Homo sapiens
ataggaataagtaattctgatgg

SEQ ID NO: 5191 - DNA, 23 bp, Homo sapiens
ctataatagagcccttcggcagg

SEQ ID NO: 5192 - DNA, 23 bp, Homo sapiens
attagacgagcaaaaggaagagg

SEQ ID NO: 5193 - DNA, 23 bp, Homo sapiens
ggatactcctatgccagggatgg

SEQ ID NO: 5194 - DNA, 23 bp, Homo sapiens
tgagtcctggatttttaatgtgg

SEQ ID NO: 5195 - DNA, 23 bp, Homo sapiens
tctttgtcagttcccactatcgg

SEQ ID NO: 5196 - DNA, 23 bp, Homo sapiens
gataaatcgaataagttggtagg

SEQ ID NO: 5197 - DNA, 23 bp, Homo sapiens
tctaatgtatttgaaaaatgtgg

SEQ ID NO: 5198 - DNA, 23 bp, Homo sapiens
cagaatagcccagtcaaaagagg

SEQ ID NO: 5199 - DNA, 23 bp, Homo sapiens
aagtaattaaaatctgaatgtgg

SEQ ID NO: 5200 - DNA, 23 bp, Homo sapiens
catgttaaattaaggtttagggg

SEQ ID NO: 5201 - DNA, 23 bp, Homo sapiens
gttcaaaaagaaacacagatagg

SEQ ID NO: 5202 - DNA, 23 bp, Homo sapiens
tctagaatctaaataaggctagg

SEQ ID NO: 5203 - DNA, 23 bp, Homo sapiens
atatgcaagctaaatatgcttgg

SEQ ID NO: 5204 - DNA, 23 bp, Homo sapiens
aatatgcttgtgatcaagaatgg

SEQ ID NO: 5205 - DNA, 23 bp, Homo sapiens
ctgacaactccaaggctggatgg

SEQ ID NO: 5206 - DNA, 23 bp, Homo sapiens
cgacttggttctaaagaagatgg

SEQ ID NO: 5207 - DNA, 23 bp, Homo sapiens
gcttcctcaaacacagggaaagg

SEQ ID NO: 5208 - DNA, 23 bp, Homo sapiens
gtaggccaagccaaatcaatcgg

SEQ ID NO: 5209 - DNA, 23 bp, Homo sapiens
agttacagtccagttacttgagg

SEQ ID NO: 5210 - DNA, 23 bp, Homo sapiens
gggtcaaccaaagtgtataaagg

SEQ ID NO: 5211 - DNA, 23 bp, Homo sapiens
ggaacccaaggaaatcagaaagg

SEQ ID NO: 5212 - DNA, 23 bp, Homo sapiens
taatgtggacatatatgttgcgg

SEQ ID NO: 5213 - DNA, 23 bp, Homo sapiens
ccatcctgtgtcttaacagtagg

SEQ ID NO: 5214 - DNA, 23 bp, Homo sapiens
ctcacagtagttttaccccatgg

SEQ ID NO: 5215 - DNA, 23 bp, Homo sapiens
aacattattaccaaaaccatcgg

SEQ ID NO: 5216 - DNA, 23 bp, Homo sapiens
agttatagctgacctttactggg

SEQ ID NO: 5217 - DNA, 23 bp, Homo sapiens
ccaaaagaaacacatttcaatgg

SEQ ID NO: 5218 - DNA, 23 bp, Homo sapiens
catttagtaacaataaatgttgg

SEQ ID NO: 5219 - DNA, 23 bp, Homo sapiens
ataagattacctttctggtaggg

SEQ ID NO: 5220 - DNA, 23 bp, Homo sapiens
tacagaatctaaagattgaaggg

SEQ ID NO: 5221 - DNA, 23 bp, Homo sapiens
gtaaagctagacggatcaaaagg

SEQ ID NO: 5222 - DNA, 23 bp, Homo sapiens
gtataaatcctgatactagctgg

SEQ ID NO: 5223 - DNA, 23 bp, Homo sapiens
aattgcaatgaaatgtatgtagg

SEQ ID NO: 5224 - DNA, 23 bp, Homo sapiens
gcacagattagtgtcacctatgg

SEQ ID NO: 5225 - DNA, 23 bp, Homo sapiens
ttttagcacacctggtgcagagg

SEQ ID NO: 5226 - DNA, 23 bp, Homo sapiens
gcccaaatcatcaaagcagatgg

SEQ ID NO: 5227 - DNA, 23 bp, Homo sapiens
tacttggaatggatgagcaaagg

SEQ ID NO: 5228 - DNA, 23 bp, Homo sapiens
tggggttactaaacattcaaagg

SEQ ID NO: 5229 - DNA, 23 bp, Homo sapiens
aaaatccacccaccccactaggg

SEQ ID NO: 5230 - DNA, 23 bp, Homo sapiens
accacatcagaccgtgggaacgg

SEQ ID NO: 5231 - DNA, 23 bp, Homo sapiens
attagacctctatttgtgctagg

SEQ ID NO: 5232 - DNA, 23 bp, Homo sapiens
ttagatctaatttgtataggggg

SEQ ID NO: 5233 - DNA, 23 bp, Homo sapiens
ccattgtgtttcccatcccaagg

SEQ ID NO: 5234 - DNA, 23 bp, Homo sapiens
aagtatctctcataggtccttgg

SEQ ID NO: 5235 - DNA, 23 bp, Homo sapiens
gttttgtcttaaatttctggagg

SEQ ID NO: 5236 - DNA, 23 bp, Homo sapiens
ttactgacgcgtcccccaaacgg

SEQ ID NO: 5237 - DNA, 23 bp, Homo sapiens
ttttaacctgaaaatccaaaggg

SEQ ID NO: 5238 - DNA, 23 bp, Homo sapiens
tgctgttctccccaaagcagggg

SEQ ID NO: 5239 - DNA, 23 bp, Homo sapiens
tttttataataaaagctgtaggg

SEQ ID NO: 5240 - DNA, 23 bp, Homo sapiens
tcaagttgttatatgtaagtggg

SEQ ID NO: 5241 - DNA, 23 bp, Homo sapiens
aaagattgcaggttggaggaggg

SEQ ID NO: 5242 - DNA, 23 bp, Homo sapiens
gctttttcaactggtagttgggg

SEQ ID NO: 5243 - DNA, 23 bp, Homo sapiens
cttgcttaaggaaaactggatgg

SEQ ID NO: 5244 - DNA, 23 bp, Homo sapiens
ctgcctcctattataccctaggg

SEQ ID NO: 5245 - DNA, 23 bp, Homo sapiens
cagacaactgagtaaccaaatgg

SEQ ID NO: 5246 - DNA, 23 bp, Homo sapiens
tttatgatggattaagggtgtgg

SEQ ID NO: 5247 - DNA, 23 bp, Homo sapiens
caatgtctgtgaattgcccaggg

SEQ ID NO: 5248 - DNA, 23 bp, Homo sapiens
ggggtatgcatgggagcagaagg

SEQ ID NO: 5249 - DNA, 23 bp, Homo sapiens
aatgtaatttttgctaagtgcgg

SEQ ID NO: 5250 - DNA, 23 bp, Homo sapiens
ttatttcctgcattagtcaaggg

SEQ ID NO: 5251 - DNA, 23 bp, Homo sapiens
ctaagaagagactgagtgctggg

SEQ ID NO: 5252 - DNA, 23 bp, Homo sapiens
aatctaggcaagctgctacaagg

SEQ ID NO: 5253 - DNA, 23 bp, Homo sapiens
ataatttctcaattaccctacgg

SEQ ID NO: 5254 - DNA, 23 bp, Homo sapiens
atttaaagttaattttatagggg

SEQ ID NO: 5255 - DNA, 23 bp, Homo sapiens
gagcccagaacatctctttgtgg

SEQ ID NO: 5256 - DNA, 23 bp, Homo sapiens
aggtagggtggggaaaaagtggg

SEQ ID NO: 5257 - DNA, 23 bp, Homo sapiens
aacatttacccataacgtaaagg

SEQ ID NO: 5258 - DNA, 23 bp, Homo sapiens
catgtgcatttgcaagaccttgg

SEQ ID NO: 5259 - DNA, 23 bp, Homo sapiens
ttaaccacccaaagctgcttagg

SEQ ID NO: 5260 - DNA, 23 bp, Homo sapiens
acaggagcagagccttgagatgg

SEQ ID NO: 5261 - DNA, 23 bp, Homo sapiens
cagtgccaggatttgaaggcggg

SEQ ID NO: 5262 - DNA, 23 bp, Homo sapiens
acttagtctcagagtgggagtgg

SEQ ID NO: 5263 - DNA, 23 bp, Homo sapiens
atattagtgtgaatgtatgtggg

SEQ ID NO: 5264 - DNA, 23 bp, Homo sapiens
atcatcttgcagatacagacagg

SEQ ID NO: 5265 - DNA, 23 bp, Homo sapiens
caagtaatctggactatcacagg

SEQ ID NO: 5266 - DNA, 23 bp, Homo sapiens
tgaaatgtatgtaggtagggtgg

SEQ ID NO: 5267 - DNA, 23 bp, Homo sapiens
gtatctgactaccagtttcaggg

SEQ ID NO: 5268 - DNA, 23 bp, Homo sapiens
gccttgaagaaaggtgttggtgg

SEQ ID NO: 5269 - DNA, 23 bp, Homo sapiens
atcgtgtatggggagagtacagg

SEQ ID NO: 5270 - DNA, 23 bp, Homo sapiens
ttgacaacttacttattgtgtgg

SEQ ID NO: 5271 - DNA, 23 bp, Homo sapiens
acataatgcaaaatgagcactgg

SEQ ID NO: 5272 - DNA, 23 bp, Homo sapiens
ttccctttattaagccggcatgg

SEQ ID NO: 5273 - DNA, 23 bp, Homo sapiens
gggtgaagaaaggagagtcgtgg

SEQ ID NO: 5274 - DNA, 23 bp, Homo sapiens
gtgaagccaggtagtaaggatgg

SEQ ID NO: 5275 - DNA, 23 bp, Homo sapiens
gcaatgaaatgtatgtaggtagg

SEQ ID NO: 5276 - DNA, 23 bp, Homo sapiens
tgagaatctatattctacatagg

SEQ ID NO: 5277 - DNA, 23 bp, Homo sapiens
agtgctcaatgggtttttggagg

SEQ ID NO: 5278 - DNA, 23 bp, Homo sapiens
tcaaattcaaataacgacatagg

SEQ ID NO: 5279 - DNA, 23 bp, Homo sapiens
cagaatgttcaattttatagggg

SEQ ID NO: 5280 - DNA, 23 bp, Homo sapiens
aatactttccaaaaaacgtcagg

SEQ ID NO: 5281 - DNA, 23 bp, Homo sapiens
agtttccgtactcccctagtggg

SEQ ID NO: 5282 - DNA, 23 bp, Homo sapiens
ggctggggaagaatgatttgagg

SEQ ID NO: 5283 - DNA, 23 bp, Homo sapiens
aaggttatagcagtgtaggctgg

SEQ ID NO: 5284 - DNA, 23 bp, Homo sapiens
tgagagacttaaaattaggtagg

SEQ ID NO: 5285 - DNA, 23 bp, Homo sapiens
gggaaaaagtgggagaagaaggg

SEQ ID NO: 5286 - DNA, 23 bp, Homo sapiens
accacagggctcttggacaaggg

SEQ ID NO: 5287 - DNA, 23 bp, Homo sapiens
tagtgatgcccaatgagccttgg

SEQ ID NO: 5288 - DNA, 23 bp, Homo sapiens
gatgtttatattctgacgaaggg

SEQ ID NO: 5289 - DNA, 23 bp, Homo sapiens
agctagaaggtaactttaggagg

SEQ ID NO: 5290 - DNA, 23 bp, Homo sapiens
gcttttagatagtaacaagatgg

SEQ ID NO: 5291 - DNA, 23 bp, Homo sapiens
tatcttttggtttcaccaagtgg

SEQ ID NO: 5292 - DNA, 23 bp, Homo sapiens
ccctgtagtatgaataccccagg

SEQ ID NO: 5293 - DNA, 23 bp, Homo sapiens
ctccagtgatactttaacatggg

SEQ ID NO: 5294 - DNA, 23 bp, Homo sapiens
gtgaggccagtttgctaaagggg

SEQ ID NO: 5295 - DNA, 23 bp, Homo sapiens
tgttgaaaactatgtcccattgg

SEQ ID NO: 5296 - DNA, 23 bp, Homo sapiens
atcagtggaaagcacttgaatgg

SEQ ID NO: 5297 - DNA, 23 bp, Homo sapiens
cacgtggctatactgttcattgg

SEQ ID NO: 5298 - DNA, 23 bp, Homo sapiens
agatagaattgagaagactatgg

SEQ ID NO: 5299 - DNA, 23 bp, Homo sapiens
taaaggactcaaacttttcgcgg

SEQ ID NO: 5300 - DNA, 23 bp, Homo sapiens
taaatgggagctttgccaaaggg

SEQ ID NO: 5301 - DNA, 23 bp, Homo sapiens
tcaacataataggacagcccagg

SEQ ID NO: 5302 - DNA, 23 bp, Homo sapiens
agtttatctttccagtaagaggg

SEQ ID NO: 5303 - DNA, 23 bp, Homo sapiens
ttacattctccatccagtccagg

SEQ ID NO: 5304 - DNA, 23 bp, Homo sapiens
ctttctgctaactttttgaaagg

SEQ ID NO: 5305 - DNA, 23 bp, Homo sapiens
ctttgatgtgtcacgtccagagg

SEQ ID NO: 5306 - DNA, 23 bp, Homo sapiens
ggatgtcgaaccactctgactgg

SEQ ID NO: 5307 - DNA, 23 bp, Homo sapiens
actgtattctgtaattgctaggg

SEQ ID NO: 5308 - DNA, 23 bp, Homo sapiens
gcatctatctctttaggaccagg

SEQ ID NO: 5309 - DNA, 23 bp, Homo sapiens
aatttcatcctattctgtatggg

SEQ ID NO: 5310 - DNA, 23 bp, Homo sapiens
gatatgccatcctattaagtagg

SEQ ID NO: 5311 - DNA, 23 bp, Homo sapiens
tcatgtacaattcatcccatagg

SEQ ID NO: 5312 - DNA, 23 bp, Homo sapiens
tggtaatgtgtttataagagagg

SEQ ID NO: 5313 - DNA, 23 bp, Homo sapiens
aattcactgtgtgtgatccatgg

SEQ ID NO: 5314 - DNA, 23 bp, Homo sapiens
ctgaaatgtctctctagcactgg

SEQ ID NO: 5315 - DNA, 23 bp, Homo sapiens
atcattagcgtagctgatagagg

SEQ ID NO: 5316 - DNA, 23 bp, Homo sapiens
tcgtcctctcagatgccaaaagg

SEQ ID NO: 5317 - DNA, 23 bp, Homo sapiens
ccctcctacctaaaactatgagg

SEQ ID NO: 5318 - DNA, 23 bp, Homo sapiens
gcacactctttatggtgaaaggg

SEQ ID NO: 5319 - DNA, 23 bp, Homo sapiens
gatccattttcaaattccatggg

SEQ ID NO: 5320 - DNA, 23 bp, Homo sapiens
aattaacttcaatagggctgtgg

SEQ ID NO: 5321 - DNA, 23 bp, Homo sapiens
cttcctcaaacacagggaaaggg

SEQ ID NO: 5322 - DNA, 23 bp, Homo sapiens
ccgtaattgtttcccttgagggg

SEQ ID NO: 5323 - DNA, 23 bp, Homo sapiens
ctcaatcccctcatatacagagg

SEQ ID NO: 5324 - DNA, 23 bp, Homo sapiens
ataaacactttcatttatcaggg

SEQ ID NO: 5325 - DNA, 23 bp, Homo sapiens
gacctaataatttcatgcgctgg

SEQ ID NO: 5326 - DNA, 23 bp, Homo sapiens
aataagattacctttctggtagg

SEQ ID NO: 5327 - DNA, 23 bp, Homo sapiens
gtaagcttcgacctcagccttgg

SEQ ID NO: 5328 - DNA, 23 bp, Homo sapiens
gtacttgaaatgttactgtcagg

SEQ ID NO: 5329 - DNA, 23 bp, Homo sapiens
tgtgtgacgtttttgtaaagtgg

SEQ ID NO: 5330 - DNA, 23 bp, Homo sapiens
gtgaaaaccctcaaaagaaaggg

SEQ ID NO: 5331 - DNA, 23 bp, Homo sapiens
gtattatccatttgcagtagagg

SEQ ID NO: 5332 - DNA, 23 bp, Homo sapiens
tgaatcattctaattggtgaggg

SEQ ID NO: 5333 - DNA, 23 bp, Homo sapiens
gcctctacagccatttaagtagg

SEQ ID NO: 5334 - DNA, 23 bp, Homo sapiens
agaacctgatttattcaaagagg

SEQ ID NO: 5335 - DNA, 23 bp, Homo sapiens
ttagaaatatgaagaaatcaggg

SEQ ID NO: 5336 - DNA, 23 bp, Homo sapiens
acattatatgcataagacatagg

SEQ ID NO: 5337 - DNA, 23 bp, Homo sapiens
atgtaaataatccgtgggggtgg

SEQ ID NO: 5338 - DNA, 23 bp, Homo sapiens
ttgacatctgaatctatgaaagg

SEQ ID NO: 5339 - DNA, 23 bp, Homo sapiens
atgctcagagtggatctgatagg

SEQ ID NO: 5340 - DNA, 23 bp, Homo sapiens
gttgtgaattatactgccaatgg

SEQ ID NO: 5341 - DNA, 23 bp, Homo sapiens
ctatgacgcgagaggatggcagg

SEQ ID NO: 5342 - DNA, 23 bp, Homo sapiens
gatttggttctgcatcaggctgg

SEQ ID NO: 5343 - DNA, 23 bp, Homo sapiens
ctagggcttaccttagaggcagg

SEQ ID NO: 5344 - DNA, 23 bp, Homo sapiens
catgtacaattcatcccataggg

SEQ ID NO: 5345 - DNA, 23 bp, Homo sapiens
tcatcctccctcataagtattgg

SEQ ID NO: 5346 - DNA, 23 bp, Homo sapiens
tatttgattttaattggcaatgg

SEQ ID NO: 5347 - DNA, 23 bp, Homo sapiens
ggcacatgttgcataaaactagg

SEQ ID NO: 5348 - DNA, 23 bp, Homo sapiens
tcaactaagatagacacaaaggg

SEQ ID NO: 5349 - DNA, 23 bp, Homo sapiens
acacaatcagatttatattgtgg

SEQ ID NO: 5350 - DNA, 23 bp, Homo sapiens
cacagcattttctcaggcatggg

SEQ ID NO: 5351 - DNA, 23 bp, Homo sapiens
cttctggctcccttccctcaggg

SEQ ID NO: 5352 - DNA, 23 bp, Homo sapiens
tccccattttatcatgtgaaggg

SEQ ID NO: 5353 - DNA, 23 bp, Homo sapiens
ttgcacttagtattataatgagg

SEQ ID NO: 5354 - DNA, 23 bp, Homo sapiens
tctctggtgatgtcattgtaagg

SEQ ID NO: 5355 - DNA, 23 bp, Homo sapiens
aaaggactcaaacttttcgcggg

SEQ ID NO: 5356 - DNA, 23 bp, Homo sapiens
atagtgtacttcaattctgctgg

SEQ ID NO: 5357 - DNA, 23 bp, Homo sapiens
aggctaatgtctattcaaatggg

SEQ ID NO: 5358 - DNA, 23 bp, Homo sapiens
ggtaatttgccagtaggatgagg

SEQ ID NO: 5359 - DNA, 23 bp, Homo sapiens
cattttggaggcaagagttgagg

SEQ ID NO: 5360 - DNA, 23 bp, Homo sapiens
agtttaaaaatccaaacaatggg

SEQ ID NO: 5361 - DNA, 23 bp, Homo sapiens
gttctgtagatgttctatagagg

SEQ ID NO: 5362 - DNA, 23 bp, Homo sapiens
attagatgatgagacaaaatggg

SEQ ID NO: 5363 - DNA, 23 bp, Homo sapiens
agtcagtgcttttagttttgggg

SEQ ID NO: 5364 - DNA, 23 bp, Homo sapiens
gttacagtccagttacttgaggg

SEQ ID NO: 5365 - DNA, 23 bp, Homo sapiens
ggttgcttttctgacagaaacgg

SEQ ID NO: 5366 - DNA, 23 bp, Homo sapiens
ggaaactctgtaaagggagtagg

SEQ ID NO: 5367 - DNA, 23 bp, Homo sapiens
actttgggccgaaaatttcaggg

SEQ ID NO: 5368 - DNA, 23 bp, Homo sapiens
tgatttccaatcaggtaggcagg

SEQ ID NO: 5369 - DNA, 23 bp, Homo sapiens
gttctcagtatgtgacctgctgg

SEQ ID NO: 5370 - DNA, 23 bp, Homo sapiens
aaaaaatgtacataatacttggg

SEQ ID NO: 5371 - DNA, 23 bp, Homo sapiens
cccagacaaaaccagaatagtgg

SEQ ID NO: 5372 - DNA, 23 bp, Homo sapiens
ggaggaattggtctttcagaagg

SEQ ID NO: 5373 - DNA, 23 bp, Homo sapiens
ttagaatccaagtttactcccgg

SEQ ID NO: 5374 - DNA, 23 bp, Homo sapiens
attaaaatattaaatgggacagg

SEQ ID NO: 5375 - DNA, 23 bp, Homo sapiens
tatcagatctgctggttacaggg

SEQ ID NO: 5376 - DNA, 23 bp, Homo sapiens
gcatagtgaaactgatgccctgg

SEQ ID NO: 5377 - DNA, 23 bp, Homo sapiens
tattctttaaagttccttggagg

SEQ ID NO: 5378 - DNA, 23 bp, Homo sapiens
gagctagaagtttttatggatgg

SEQ ID NO: 5379 - DNA, 23 bp, Homo sapiens
agttcttgctatcattaagaggg

SEQ ID NO: 5380 - DNA, 23 bp, Homo sapiens
gttttccttctggctgtgagagg

SEQ ID NO: 5381 - DNA, 23 bp, Homo sapiens
ggcaacctatgggattaagtagg

SEQ ID NO: 5382 - DNA, 23 bp, Homo sapiens
aagagaaagattataagaagagg

SEQ ID NO: 5383 - DNA, 23 bp, Homo sapiens
ttttgttcacatgtaggctgagg

SEQ ID NO: 5384 - DNA, 23 bp, Homo sapiens
agatttgattcaactgtccatgg

SEQ ID NO: 5385 - DNA, 23 bp, Homo sapiens
agccacagcacaacaaaaagagg

SEQ ID NO: 5386 - DNA, 23 bp, Homo sapiens
tttcatgcccatcaaatatgagg

SEQ ID NO: 5387 - DNA, 23 bp, Homo sapiens
gcccattcttcctaataggcagg

SEQ ID NO: 5388 - DNA, 23 bp, Homo sapiens
tttctttaagaacagactgttgg

SEQ ID NO: 5389 - DNA, 23 bp, Homo sapiens
gaggagggtgggtctatccaagg

SEQ ID NO: 5390 - DNA, 23 bp, Homo sapiens
gttctcaatagcaaattgcttgg

SEQ ID NO: 5391 - DNA, 23 bp, Homo sapiens
tttgttttctgtggttgaaaggg

SEQ ID NO: 5392 - DNA, 23 bp, Homo sapiens
agcactgcctcagagcaattcgg

SEQ ID NO: 5393 - DNA, 23 bp, Homo sapiens
gaatccaaagtatctctcatagg

SEQ ID NO: 5394 - DNA, 23 bp, Homo sapiens
acagggacaagaccaagaacagg

SEQ ID NO: 5395 - DNA, 23 bp, Homo sapiens
gctttgatcccatacagaatagg

SEQ ID NO: 5396 - DNA, 23 bp, Homo sapiens
tgtgctgaagtctaagacaaagg

SEQ ID NO: 5397 - DNA, 23 bp, Homo sapiens
gcctacactgctataaccttagg

SEQ ID NO: 5398 - DNA, 23 bp, Homo sapiens
ataaaagttttaaaaagcaaagg

SEQ ID NO: 5399 - DNA, 23 bp, Homo sapiens
gagcattcttgggcaccagctgg

SEQ ID NO: 5400 - DNA, 23 bp, Homo sapiens
tattgatgtaaacgttatgcagg

SEQ ID NO: 5401 - DNA, 23 bp, Homo sapiens
tttatcagacattttctcctggg

SEQ ID NO: 5402 - DNA, 23 bp, Homo sapiens
gagcagcctgcacaagactttgg

SEQ ID NO: 5403 - DNA, 23 bp, Homo sapiens
tgacatactctccagctgctagg

SEQ ID NO: 5404 - DNA, 23 bp, Homo sapiens
agcaaaatgtcttaacactaggg

SEQ ID NO: 5405 - DNA, 23 bp, Homo sapiens
ggtagtgttggctttataccagg

SEQ ID NO: 5406 - DNA, 23 bp, Homo sapiens
atatattagcatatgttctaggg

SEQ ID NO: 5407 - DNA, 23 bp, Homo sapiens
gggataataccctgagggaaggg

SEQ ID NO: 5408 - DNA, 23 bp, Homo sapiens
agaactgcataggctttgtatgg

SEQ ID NO: 5409 - DNA, 23 bp, Homo sapiens
aagcatttagaggggaagactgg

SEQ ID NO: 5410 - DNA, 23 bp, Homo sapiens
gtgttctgcagcaggttaagtgg

SEQ ID NO: 5411 - DNA, 23 bp, Homo sapiens
tgatccacatgatctggcctcgg

SEQ ID NO: 5412 - DNA, 23 bp, Homo sapiens
tatgattcagtacctagctcagg

SEQ ID NO: 5413 - DNA, 23 bp, Homo sapiens
taagtctttgacctttctaaggg

SEQ ID NO: 5414 - DNA, 23 bp, Homo sapiens
ttcgactttggagaagcaaaggg

SEQ ID NO: 5415 - DNA, 23 bp, Homo sapiens
gtttgagaagacatagggaatgg

SEQ ID NO: 5416 - DNA, 23 bp, Homo sapiens
gatatttatatattcggctgagg

SEQ ID NO: 5417 - DNA, 23 bp, Homo sapiens
attctcttaccttttgagaaggg

SEQ ID NO: 5418 - DNA, 23 bp, Homo sapiens
gaattgtatctcttcagaaaggg

SEQ ID NO: 5419 - DNA, 23 bp, Homo sapiens
atacttttgggtggagagagggg

SEQ ID NO: 5420 - DNA, 23 bp, Homo sapiens
ataacactgttaacttacatggg

SEQ ID NO: 5421 - DNA, 23 bp, Homo sapiens
tggaaattaaaatacagtaaagg

SEQ ID NO: 5422 - DNA, 23 bp, Homo sapiens
cagaagaaaaagtttaactaggg

SEQ ID NO: 5423 - DNA, 23 bp, Homo sapiens
tgacaagacctgtaaatgcccgg

SEQ ID NO: 5424 - DNA, 23 bp, Homo sapiens
cctcatagttttaggtaggaggg

SEQ ID NO: 5425 - DNA, 23 bp, Homo sapiens
gctagctgcaaggaataacttgg

SEQ ID NO: 5426 - DNA, 23 bp, Homo sapiens
ccaatgctgtttatcaccacagg

SEQ ID NO: 5427 - DNA, 23 bp, Homo sapiens
gtcctagtcttgcaaatgctagg

SEQ ID NO: 5428 - DNA, 23 bp, Homo sapiens
aagtgccttttctattcagaagg

SEQ ID NO: 5429 - DNA, 23 bp, Homo sapiens
taccataaaaaacttctaagtgg

SEQ ID NO: 5430 - DNA, 23 bp, Homo sapiens
gaagtttgccaaataatacttgg

SEQ ID NO: 5431 - DNA, 23 bp, Homo sapiens
ttaagacattattaaagtgtggg

SEQ ID NO: 5432 - DNA, 23 bp, Homo sapiens
gcaaaagaccacaatctacctgg

SEQ ID NO: 5433 - DNA, 23 bp, Homo sapiens
ctattgacttgcactcccacagg

SEQ ID NO: 5434 - DNA, 23 bp, Homo sapiens
tctcccaatgagtgatatgatgg

SEQ ID NO: 5435 - DNA, 23 bp, Homo sapiens
tttgaacctgaatcagatgatgg

SEQ ID NO: 5436 - DNA, 23 bp, Homo sapiens
cttagcgacagttatgtccatgg

SEQ ID NO: 5437 - DNA, 23 bp, Homo sapiens
atatatagcttccaagaatgagg

SEQ ID NO: 5438 - DNA, 23 bp, Homo sapiens
cttacacttgccattggtcgggg

SEQ ID NO: 5439 - DNA, 23 bp, Homo sapiens
attcgcaggtggtacttggttgg

SEQ ID NO: 5440 - DNA, 23 bp, Homo sapiens
ttttataaccagttgacagatgg

SEQ ID NO: 5441 - DNA, 23 bp, Homo sapiens
ctaaggttaatttcaacgaaagg

SEQ ID NO: 5442 - DNA, 23 bp, Homo sapiens
acactatgagagaaataaaacgg

SEQ ID NO: 5443 - DNA, 23 bp, Homo sapiens
ttttccccctagtttaaaagtgg

SEQ ID NO: 5444 - DNA, 23 bp, Homo sapiens
gtgccccagctaggtgtacatgg

SEQ ID NO: 5445 - DNA, 23 bp, Homo sapiens
gatcagttataacagacttaggg

SEQ ID NO: 5446 - DNA, 23 bp, Homo sapiens
caggtaaagaaaacaatctaggg

SEQ ID NO: 5447 - DNA, 23 bp, Homo sapiens
ctaacaagctagcaaaatcctgg

SEQ ID NO: 5448 - DNA, 23 bp, Homo sapiens
ttacaaaatcagacccatagagg

SEQ ID NO: 5449 - DNA, 23 bp, Homo sapiens
tgtattgccttatatacacctgg

SEQ ID NO: 5450 - DNA, 23 bp, Homo sapiens
ttgattcagtttaagccacttgg

SEQ ID NO: 5451 - DNA, 23 bp, Homo sapiens
agagactccactcttttgctagg

SEQ ID NO: 5452 - DNA, 23 bp, Homo sapiens
aacattgataaattaaacattgg

SEQ ID NO: 5453 - DNA, 23 bp, Homo sapiens
ataatccttacacttgccattgg

SEQ ID NO: 5454 - DNA, 23 bp, Homo sapiens
atttcacttggcctatctcaggg

SEQ ID NO: 5455 - DNA, 23 bp, Homo sapiens
accttttctaggataaagcttgg

SEQ ID NO: 5456 - DNA, 23 bp, Homo sapiens
tagagctatttttaaagcagtgg

SEQ ID NO: 5457 - DNA, 23 bp, Homo sapiens
gcaaagtgatctctgccagctgg

SEQ ID NO: 5458 - DNA, 23 bp, Homo sapiens
tattagtttggcatccctgtggg

SEQ ID NO: 5459 - DNA, 23 bp, Homo sapiens
aaaaaaatatctttcagccaggg

SEQ ID NO: 5460 - DNA, 23 bp, Homo sapiens
catctgagaggacgacagctagg

SEQ ID NO: 5461 - DNA, 23 bp, Homo sapiens
cattggtgctcaatatactaagg

SEQ ID NO: 5462 - DNA, 23 bp, Homo sapiens
gcgaattggacaaaattcaatgg

SEQ ID NO: 5463 - DNA, 23 bp, Homo sapiens
tatcattaagaggggacaaatgg

SEQ ID NO: 5464 - DNA, 23 bp, Homo sapiens
aatgtaactaagcatttagaggg

SEQ ID NO: 5465 - DNA, 23 bp, Homo sapiens
aatgggagtgtctgaccagctgg

SEQ ID NO: 5466 - DNA, 23 bp, Homo sapiens
cttgagttaggtgtaaagaatgg

SEQ ID NO: 5467 - DNA, 23 bp, Homo sapiens
cttcttccgtggcaatatgcagg

SEQ ID NO: 5468 - DNA, 23 bp, Homo sapiens
gggcaactaattctgaaaacggg

SEQ ID NO: 5469 - DNA, 23 bp, Homo sapiens
actcttgtgggtggcagtaaggg

SEQ ID NO: 5470 - DNA, 23 bp, Homo sapiens
gcacacactcccttctcaaaagg

SEQ ID NO: 5471 - DNA, 23 bp, Homo sapiens
aaagtagtagaaaacaatagtgg

SEQ ID NO: 5472 - DNA, 23 bp, Homo sapiens
tcttttttgcaagattgcattgg

SEQ ID NO: 5473 - DNA, 23 bp, Homo sapiens
cctgtacttgatatgcttggagg

SEQ ID NO: 5474 - DNA, 23 bp, Homo sapiens
actaaggatttttcaatgcaggg

SEQ ID NO: 5475 - DNA, 23 bp, Homo sapiens
cctgcctcctattataccctagg

SEQ ID NO: 5476 - DNA, 23 bp, Homo sapiens
caggggccacttttaaactaggg

SEQ ID NO: 5477 - DNA, 23 bp, Homo sapiens
tgataagtcctatgagaagcagg

SEQ ID NO: 5478 - DNA, 23 bp, Homo sapiens
ggtagagagtttctttcccaagg

SEQ ID NO: 5479 - DNA, 23 bp, Homo sapiens
acctaaactgcaaagcaaaccgg

SEQ ID NO: 5480 - DNA, 23 bp, Homo sapiens
ggtcaaaatgtcacaccaaaagg

SEQ ID NO: 5481 - DNA, 23 bp, Homo sapiens
tgagcaagaaggtaaccaaaagg

SEQ ID NO: 5482 - DNA, 23 bp, Homo sapiens
gcaaatttaatcacctctgaggg

SEQ ID NO: 5483 - DNA, 23 bp, Homo sapiens
ctcaacctaatttatttctgcgg

SEQ ID NO: 5484 - DNA, 23 bp, Homo sapiens
tcaaattctatgaggtagagagg

SEQ ID NO: 5485 - DNA, 23 bp, Homo sapiens
tgtattttgtctttgtgcaaagg

SEQ ID NO: 5486 - DNA, 23 bp, Homo sapiens
ataaaactgaatccttaagctgg

SEQ ID NO: 5487 - DNA, 23 bp, Homo sapiens
ttagctaacttgctttaccttgg

SEQ ID NO: 5488 - DNA, 23 bp, Homo sapiens
aggaaatagtagggtgacatagg

SEQ ID NO: 5489 - DNA, 23 bp, Homo sapiens
ctttaatccagtgccaggcccgg

SEQ ID NO: 5490 - DNA, 23 bp, Homo sapiens
tagagacccttgactaatgcagg

SEQ ID NO: 5491 - DNA, 23 bp, Homo sapiens
aagaagagacgaattttgcttgg

SEQ ID NO: 5492 - DNA, 23 bp, Homo sapiens
gctcttgtctcaagatgacttgg

SEQ ID NO: 5493 - DNA, 23 bp, Homo sapiens
gcgtcttgcctacctgtctccgg

SEQ ID NO: 5494 - DNA, 23 bp, Homo sapiens
atgtatgtatggtacatgtaagg

SEQ ID NO: 5495 - DNA, 23 bp, Homo sapiens
gacaggtcatccctagcagctgg

SEQ ID NO: 5496 - DNA, 23 bp, Homo sapiens
atttgcatcattgtccctgcagg

SEQ ID NO: 5497 - DNA, 23 bp, Homo sapiens
tttcttctatcatttccaaaagg

SEQ ID NO: 5498 - DNA, 23 bp, Homo sapiens
ttgagcaagactacacctaatgg

SEQ ID NO: 5499 - DNA, 23 bp, Homo sapiens
tatacattcctgcctttgatggg

SEQ ID NO: 5500 - DNA, 23 bp, Homo sapiens
aatatccaaaagttaatcaatgg

SEQ ID NO: 5501 - DNA, 23 bp, Homo sapiens
ttattttcaatgattttccatgg

SEQ ID NO: 5502 - DNA, 23 bp, Homo sapiens
tttgggagaagaaattcagtagg

SEQ ID NO: 5503 - DNA, 23 bp, Homo sapiens
aattcagaaggaccggagacagg

SEQ ID NO: 5504 - DNA, 23 bp, Homo sapiens
cttttctgacagaaacggtatgg

SEQ ID NO: 5505 - DNA, 23 bp, Homo sapiens
gagtgagtagtatgagcaaatgg

SEQ ID NO: 5506 - DNA, 23 bp, Homo sapiens
gggatgaaagaggagacaaaggg

SEQ ID NO: 5507 - DNA, 23 bp, Homo sapiens
ggaactcaggtaaaactagtagg

SEQ ID NO: 5508 - DNA, 23 bp, Homo sapiens
atgctgttctccccaaagcaggg

SEQ ID NO: 5509 - DNA, 23 bp, Homo sapiens
ctcagacttagtcatctaaaggg

SEQ ID NO: 5510 - DNA, 23 bp, Homo sapiens
cagactgttcttgggccgctggg

SEQ ID NO: 5511 - DNA, 23 bp, Homo sapiens
tttcagggacatattcagaaagg

SEQ ID NO: 5512 - DNA, 23 bp, Homo sapiens
agacgaattttgcttggctaggg

SEQ ID NO: 5513 - DNA, 23 bp, Homo sapiens
cttaattttgtaatttcccaggg

SEQ ID NO: 5514 - DNA, 23 bp, Homo sapiens
ctgtcagaaaagcaaccattggg

SEQ ID NO: 5515 - DNA, 23 bp, Homo sapiens
tggaatagactaaactgcactgg

SEQ ID NO: 5516 - DNA, 23 bp, Homo sapiens
ccttatccatccttactacctgg

SEQ ID NO: 5517 - DNA, 23 bp, Homo sapiens
ttaccaagtttccatttacaagg

SEQ ID NO: 5518 - DNA, 23 bp, Homo sapiens
gatgtactatttttgaagccagg

SEQ ID NO: 5519 - DNA, 23 bp, Homo sapiens
gcaatgtctgtgaattgcccagg

SEQ ID NO: 5520 - DNA, 23 bp, Homo sapiens
aagacaaaaccccagagaaaggg

SEQ ID NO: 5521 - DNA, 23 bp, Homo sapiens
aaacactcagagtagacaacagg

SEQ ID NO: 5522 - DNA, 23 bp, Homo sapiens
acttccacgattaaaaacatagg

SEQ ID NO: 5523 - DNA, 23 bp, Homo sapiens
catgctcacgattcttgcctggg

SEQ ID NO: 5524 - DNA, 23 bp, Homo sapiens
actcttttcatgattagagatgg

SEQ ID NO: 5525 - DNA, 23 bp, Homo sapiens
atctctttcccttcaagagaggg

SEQ ID NO: 5526 - DNA, 23 bp, Homo sapiens
ggagtcctataggataatttggg

SEQ ID NO: 5527 - DNA, 23 bp, Homo sapiens
tgtaaagctggacttcaagttgg

SEQ ID NO: 5528 - DNA, 23 bp, Homo sapiens
atattactgcagtacaagccagg

SEQ ID NO: 5529 - DNA, 23 bp, Homo sapiens
ggcattttgtgcaatgctgaggg

SEQ ID NO: 5530 - DNA, 23 bp, Homo sapiens
gacatactctccagctgctaggg

SEQ ID NO: 5531 - DNA, 23 bp, Homo sapiens
cctgctttgctcaaatgtcaggg

SEQ ID NO: 5532 - DNA, 23 bp, Homo sapiens
catctttaaaaagtttctatggg

SEQ ID NO: 5533 - DNA, 23 bp, Homo sapiens
tcgcctggcttgtttgtgcaagg

SEQ ID NO: 5534 - DNA, 23 bp, Homo sapiens
tcataaaatgtaatatctgttgg

SEQ ID NO: 5535 - DNA, 23 bp, Homo sapiens
ggtccttggagcaatcgtattgg

SEQ ID NO: 5536 - DNA, 23 bp, Homo sapiens
ggtctattcatagacttgtatgg

SEQ ID NO: 5537 - DNA, 23 bp, Homo sapiens
gtattcttattcccattatgtgg

SEQ ID NO: 5538 - DNA, 23 bp, Homo sapiens
agtattctacttagagaaagagg

SEQ ID NO: 5539 - DNA, 23 bp, Homo sapiens
attcctttacactctaaaagtgg

SEQ ID NO: 5540 - DNA, 23 bp, Homo sapiens
gagtcccaagtacaccttgatgg

SEQ ID NO: 5541 - DNA, 23 bp, Homo sapiens
ttgactttgcccttgccaaaagg

SEQ ID NO: 5542 - DNA, 23 bp, Homo sapiens
gtgacatacaaaaagtctactgg

SEQ ID NO: 5543 - DNA, 23 bp, Homo sapiens
attgtgttaatggattataatgg

SEQ ID NO: 5544 - DNA, 23 bp, Homo sapiens
gatcagcctttggtagagatagg

SEQ ID NO: 5545 - DNA, 23 bp, Homo sapiens
tctctttctaacggtaaaagtgg

SEQ ID NO: 5546 - DNA, 23 bp, Homo sapiens
tttttgtctaagtatatatgtgg

SEQ ID NO: 5547 - DNA, 23 bp, Homo sapiens
ttacgtatgtatgacttgcttgg

SEQ ID NO: 5548 - DNA, 23 bp, Homo sapiens
tgttgtacctcaaatagcttagg

SEQ ID NO: 5549 - DNA, 23 bp, Homo sapiens
tggcatgtcacctaactggctgg

SEQ ID NO: 5550 - DNA, 23 bp, Homo sapiens
tgtacttccctttattaagccgg

SEQ ID NO: 5551 - DNA, 23 bp, Homo sapiens
tactgctttggagtattgaaagg

SEQ ID NO: 5552 - DNA, 23 bp, Homo sapiens
tctattatcaagcatatcctagg

SEQ ID NO: 5553 - DNA, 23 bp, Homo sapiens
ttaaaaagcacctagaggattgg

SEQ ID NO: 5554 - DNA, 23 bp, Homo sapiens
ctttgtggatatgtgactaaagg

SEQ ID NO: 5555 - DNA, 23 bp, Homo sapiens
cacagaaagttggaaccaaaggg

SEQ ID NO: 5556 - DNA, 23 bp, Homo sapiens
ttctgcttatgtgtaagccttgg

SEQ ID NO: 5557 - DNA, 23 bp, Homo sapiens
acttagagagtatacattgaagg

SEQ ID NO: 5558 - DNA, 23 bp, Homo sapiens
tgcctagtcccaatttctggtgg

SEQ ID NO: 5559 - DNA, 23 bp, Homo sapiens
tcaaggcagttacgggtaaaggg

SEQ ID NO: 5560 - DNA, 23 bp, Homo sapiens
taggattagcttatcccaaaggg

SEQ ID NO: 5561 - DNA, 23 bp, Homo sapiens
gactgctctgggttgtactaagg

SEQ ID NO: 5562 - DNA, 23 bp, Homo sapiens
acatgaatcccaaagccatcagg

SEQ ID NO: 5563 - DNA, 23 bp, Homo sapiens
tgttttttctcctaaatagcagg

SEQ ID NO: 5564 - DNA, 23 bp, Homo sapiens
tttcccttcaagagagggagtgg

SEQ ID NO: 5565 - DNA, 23 bp, Homo sapiens
catgaattcctccttgggccagg

SEQ ID NO: 5566 - DNA, 23 bp, Homo sapiens
tgaaaggagttttagtatagggg

SEQ ID NO: 5567 - DNA, 23 bp, Homo sapiens
gagaccactccagagaatatagg

SEQ ID NO: 5568 - DNA, 23 bp, Homo sapiens
ataatacaagtcgaaaaagttgg

SEQ ID NO: 5569 - DNA, 23 bp, Homo sapiens
gttgctccaaattttaacttggg

SEQ ID NO: 5570 - DNA, 23 bp, Homo sapiens
acaaacaaatataatgaaaacgg

SEQ ID NO: 5571 - DNA, 23 bp, Homo sapiens
tttatttcaagaaaaaaagcagg

SEQ ID NO: 5572 - DNA, 23 bp, Homo sapiens
atgatttgctttcatcatgatgg

SEQ ID NO: 5573 - DNA, 23 bp, Homo sapiens
agaaacccagcaagctgaaaggg

SEQ ID NO: 5574 - DNA, 23 bp, Homo sapiens
gatctatgtaaaaccttccatgg

SEQ ID NO: 5575 - DNA, 23 bp, Homo sapiens
aaatgagtgaatacataaaacgg

SEQ ID NO: 5576 - DNA, 23 bp, Homo sapiens
ttgcatctcactaggcaaatggg

SEQ ID NO: 5577 - DNA, 23 bp, Homo sapiens
tagacacttttgaagaagatggg

SEQ ID NO: 5578 - DNA, 23 bp, Homo sapiens
ttatgggataaagaaacatatgg

SEQ ID NO: 5579 - DNA, 23 bp, Homo sapiens
catactagattaacttgaaaggg

SEQ ID NO: 5580 - DNA, 23 bp, Homo sapiens
tcatacacatttttaaaagcagg

SEQ ID NO: 5581 - DNA, 23 bp, Homo sapiens
gctctgctgcatggtagaacagg

SEQ ID NO: 5582 - DNA, 23 bp, Homo sapiens
ttttatgaattcagaaggaccgg

SEQ ID NO: 5583 - DNA, 23 bp, Homo sapiens
gaaaacatgttatatgagaatgg

SEQ ID NO: 5584 - DNA, 23 bp, Homo sapiens
ccactcagttcacttgataaggg

SEQ ID NO: 5585 - DNA, 23 bp, Homo sapiens
gatacagtgccaggatttgaagg

SEQ ID NO: 5586 - DNA, 23 bp, Homo sapiens
atatttctgaggactgggggtgg

SEQ ID NO: 5587 - DNA, 23 bp, Homo sapiens
gggaaaggtgagagaagtcttgg

SEQ ID NO: 5588 - DNA, 23 bp, Homo sapiens
atcaaactgtgaatttaaagtgg

SEQ ID NO: 5589 - DNA, 23 bp, Homo sapiens
tgtgaatccccagctccagctgg

SEQ ID NO: 5590 - DNA, 23 bp, Homo sapiens
atattgccacggaagaaggctgg

SEQ ID NO: 5591 - DNA, 23 bp, Homo sapiens
ctgggcctgctgtattccctggg

SEQ ID NO: 5592 - DNA, 23 bp, Homo sapiens
catttgttgtttgttttctgtgg

SEQ ID NO: 5593 - DNA, 23 bp, Homo sapiens
ttgcaactgctgtttaagctggg

SEQ ID NO: 5594 - DNA, 23 bp, Homo sapiens
tcatggatctacacaacctctgg

SEQ ID NO: 5595 - DNA, 23 bp, Homo sapiens
tgggagctctcacaagccttggg

SEQ ID NO: 5596 - DNA, 23 bp, Homo sapiens
gattgttttctttacctgcaggg

SEQ ID NO: 5597 - DNA, 23 bp, Homo sapiens
gagagtgagaacgaggatgaggg

SEQ ID NO: 5598 - DNA, 23 bp, Homo sapiens
agccaggcgagagagaaaactgg

SEQ ID NO: 5599 - DNA, 23 bp, Homo sapiens
agttatttatgaatacaaacagg

SEQ ID NO: 5600 - DNA, 23 bp, Homo sapiens
attaaagtcagctttgcaaatgg

SEQ ID NO: 5601 - DNA, 23 bp, Homo sapiens
acatccagatattcaatagtagg

SEQ ID NO: 5602 - DNA, 23 bp, Homo sapiens
atacctggaagatatataatggg

SEQ ID NO: 5603 - DNA, 23 bp, Homo sapiens
ctcattcctacttaataggatgg

SEQ ID NO: 5604 - DNA, 23 bp, Homo sapiens
atcattatcagcttgaaaagtgg

SEQ ID NO: 5605 - DNA, 23 bp, Homo sapiens
attgtttgctaccaggagaaagg

SEQ ID NO: 5606 - DNA, 23 bp, Homo sapiens
agacaatgctagttttagtaggg

SEQ ID NO: 5607 - DNA, 23 bp, Homo sapiens
tcaggtgtgatactgtaaacagg

SEQ ID NO: 5608 - DNA, 23 bp, Homo sapiens
cttcaagagaggatgactatagg

SEQ ID NO: 5609 - DNA, 23 bp, Homo sapiens
ttctggccttaagttcaaaaggg

SEQ ID NO: 5610 - DNA, 23 bp, Homo sapiens
ttgcctctgcacctttacactgg

SEQ ID NO: 5611 - DNA, 23 bp, Homo sapiens
tttaaaatatcaactacctcagg

SEQ ID NO: 5612 - DNA, 23 bp, Homo sapiens
gtatgctaattaaaatatacagg

SEQ ID NO: 5613 - DNA, 23 bp, Homo sapiens
cattttaccaggtattctaaagg

SEQ ID NO: 5614 - DNA, 23 bp, Homo sapiens
gatggtatatatataatccttgg

SEQ ID NO: 5615 - DNA, 23 bp, Homo sapiens
ttttaggtcctttcgtgttgtgg

SEQ ID NO: 5616 - DNA, 23 bp, Homo sapiens
atgtacaagcccgaaaaggctgg

SEQ ID NO: 5617 - DNA, 23 bp, Homo sapiens
gacccttgcaatagataagttgg

SEQ ID NO: 5618 - DNA, 23 bp, Homo sapiens
ccagcaaacacagtgctcaatgg

SEQ ID NO: 5619 - DNA, 23 bp, Homo sapiens
tgtatcatgcatactaaagatgg

SEQ ID NO: 5620 - DNA, 23 bp, Homo sapiens
tctctatgacacactatactagg

SEQ ID NO: 5621 - DNA, 23 bp, Homo sapiens
cgctgtttcccgaaatgccaagg

SEQ ID NO: 5622 - DNA, 23 bp, Homo sapiens
gatcaagaatggatggaaacagg

SEQ ID NO: 5623 - DNA, 23 bp, Homo sapiens
acaagtagcagggtagaatcagg

SEQ ID NO: 5624 - DNA, 23 bp, Homo sapiens
aatttactaagttatttgaatgg

SEQ ID NO: 5625 - DNA, 23 bp, Homo sapiens
ggcatgtttggtcttgcaaaggg

SEQ ID NO: 5626 - DNA, 23 bp, Homo sapiens
ttagaccaacgcattgtagttgg

SEQ ID NO: 5627 - DNA, 23 bp, Homo sapiens
cagcttttaaaaggaggaggggg

SEQ ID NO: 5628 - DNA, 23 bp, Homo sapiens
tactaaacacagacaaatgatgg

SEQ ID NO: 5629 - DNA, 23 bp, Homo sapiens
cacagaaattaacttcaataggg

SEQ ID NO: 5630 - DNA, 23 bp, Homo sapiens
aacatactatttctcttggatgg

SEQ ID NO: 5631 - DNA, 23 bp, Homo sapiens
ctcactgtcaattttgagtgggg

SEQ ID NO: 5632 - DNA, 23 bp, Homo sapiens
gttaagacattattaaagtgtgg

SEQ ID NO: 5633 - DNA, 23 bp, Homo sapiens
ggaataacaaatgaatcataagg

SEQ ID NO: 5634 - DNA, 23 bp, Homo sapiens
agtgatctccctaagcatacagg

SEQ ID NO: 5635 - DNA, 23 bp, Homo sapiens
tctgggttgtactaaggagtagg

SEQ ID NO: 5636 - DNA, 23 bp, Homo sapiens
ggcatcactaggaatacaacagg

SEQ ID NO: 5637 - DNA, 23 bp, Homo sapiens
aacactaatcaaaagcaaatcgg

SEQ ID NO: 5638 - DNA, 23 bp, Homo sapiens
tctatctcgtaaataagagctgg

SEQ ID NO: 5639 - DNA, 23 bp, Homo sapiens
atttttccaaatgactaagtagg

SEQ ID NO: 5640 - DNA, 23 bp, Homo sapiens
aaaatgtttgtcatagaaaaggg

SEQ ID NO: 5641 - DNA, 23 bp, Homo sapiens
aacactaaaccagtttcaaaagg

SEQ ID NO: 5642 - DNA, 23 bp, Homo sapiens
tgagcatgtgtcttagcaaatgg

SEQ ID NO: 5643 - DNA, 23 bp, Homo sapiens
gcatcaggctggtagttgctagg

SEQ ID NO: 5644 - DNA, 23 bp, Homo sapiens
tgtagagaaataagaggaaccgg

SEQ ID NO: 5645 - DNA, 23 bp, Homo sapiens
tggagaagcaagagaagctaagg

SEQ ID NO: 5646 - DNA, 23 bp, Homo sapiens
tgcagctcctcatatttgatggg

SEQ ID NO: 5647 - DNA, 23 bp, Homo sapiens
ccaaaattccattggaatgacgg

SEQ ID NO: 5648 - DNA, 23 bp, Homo sapiens
tgtctattgccaaatgtaaaggg

SEQ ID NO: 5649 - DNA, 23 bp, Homo sapiens
tgagccactttattgttgatggg

SEQ ID NO: 5650 - DNA, 23 bp, Homo sapiens
attgcactgcacattgccttcgg

SEQ ID NO: 5651 - DNA, 23 bp, Homo sapiens
gccaaaataaaggggatgtcagg

SEQ ID NO: 5652 - DNA, 23 bp, Homo sapiens
tggagtacagttcaaaaataggg

SEQ ID NO: 5653 - DNA, 23 bp, Homo sapiens
gctgaaatgagacacgttgccgg

SEQ ID NO: 5654 - DNA, 23 bp, Homo sapiens
tcctagtcttgcaaatgctaggg

SEQ ID NO: 5655 - DNA, 23 bp, Homo sapiens
ctattgtagccatatcaataagg

SEQ ID NO: 5656 - DNA, 23 bp, Homo sapiens
ccatctaccctgatttttggagg

SEQ ID NO: 5657 - DNA, 23 bp, Homo sapiens
ttttgtgtttcagggcagatagg

SEQ ID NO: 5658 - DNA, 23 bp, Homo sapiens
gcctgggtctgacataactttgg

SEQ ID NO: 5659 - DNA, 23 bp, Homo sapiens
aggttctccgggagtaaacttgg

SEQ ID NO: 5660 - DNA, 23 bp, Homo sapiens
tgctctttacatacactccttgg

SEQ ID NO: 5661 - DNA, 23 bp, Homo sapiens
atccatctagtgtttgattgagg

SEQ ID NO: 5662 - DNA, 23 bp, Homo sapiens
ttttggctataacctctaaaggg

SEQ ID NO: 5663 - DNA, 23 bp, Homo sapiens
gtgtccttatagcttcttggtgg

SEQ ID NO: 5664 - DNA, 23 bp, Homo sapiens
tttacgttcaaatgttgtaaagg

SEQ ID NO: 5665 - DNA, 23 bp, Homo sapiens
tcatttgcatcactgctgcttgg

SEQ ID NO: 5666 - DNA, 23 bp, Homo sapiens
actgatctatcagccaaaatcgg

SEQ ID NO: 5667 - DNA, 23 bp, Homo sapiens
ctatgttacactcagttagctgg

SEQ ID NO: 5668 - DNA, 23 bp, Homo sapiens
tttcactgcaatcctttcatggg

SEQ ID NO: 5669 - DNA, 23 bp, Homo sapiens
tgtgaggccagtttgctaaaggg

SEQ ID NO: 5670 - DNA, 23 bp, Homo sapiens
atagatcagctgctacactatgg

SEQ ID NO: 5671 - DNA, 23 bp, Homo sapiens
ggtgatctacaagagaagttggg

SEQ ID NO: 5672 - DNA, 23 bp, Homo sapiens
aataattgctagagggaaaaggg

SEQ ID NO: 5673 - DNA, 23 bp, Homo sapiens
tgatcaaaaaagtataaaacagg

SEQ ID NO: 5674 - DNA, 23 bp, Homo sapiens
ttaaactacattgaattccctgg

SEQ ID NO: 5675 - DNA, 23 bp, Homo sapiens
attcaggtaagtgcttaattggg

SEQ ID NO: 5676 - DNA, 23 bp, Homo sapiens
ataagacacagcattttctcagg

SEQ ID NO: 5677 - DNA, 23 bp, Homo sapiens
gagaatctatattctacataggg

SEQ ID NO: 5678 - DNA, 23 bp, Homo sapiens
ttgtatggattttatctgatggg

SEQ ID NO: 5679 - DNA, 23 bp, Homo sapiens
gttgtgctttggtttaccttggg

SEQ ID NO: 5680 - DNA, 23 bp, Homo sapiens
aatcatagattctttgctaaggg

SEQ ID NO: 5681 - DNA, 23 bp, Homo sapiens
ttaggaagcaccagccagttagg

SEQ ID NO: 5682 - DNA, 23 bp, Homo sapiens
catgtgtcctgaggacctacagg

SEQ ID NO: 5683 - DNA, 23 bp, Homo sapiens
gctgacgctgacacgggcattgg

SEQ ID NO: 5684 - DNA, 23 bp, Homo sapiens
ttgaagactcccttttaagttgg

SEQ ID NO: 5685 - DNA, 23 bp, Homo sapiens
tattatactaaattaaaaacagg

SEQ ID NO: 5686 - DNA, 23 bp, Homo sapiens
cttcagtgtgtacagtaataggg

SEQ ID NO: 5687 - DNA, 23 bp, Homo sapiens
ttttgcctggataattcaaatgg

SEQ ID NO: 5688 - DNA, 23 bp, Homo sapiens
aacagggccttatgattaaaggg

SEQ ID NO: 5689 - DNA, 23 bp, Homo sapiens
gtattttgtacatgaggaaaagg

SEQ ID NO: 5690 - DNA, 23 bp, Homo sapiens
ctgagtgtaacatagaatatagg

SEQ ID NO: 5691 - DNA, 23 bp, Homo sapiens
ttaagaacagactgttggccagg

SEQ ID NO: 5692 - DNA, 23 bp, Homo sapiens
aattatcaaaccccattatgagg

SEQ ID NO: 5693 - DNA, 23 bp, Homo sapiens
atccatgccggcttaataaaggg

SEQ ID NO: 5694 - DNA, 23 bp, Homo sapiens
cttaactaatcacattgcttggg

SEQ ID NO: 5695 - DNA, 23 bp, Homo sapiens
ctgtttctagaactatattgtgg

SEQ ID NO: 5696 - DNA, 23 bp, Homo sapiens
gacaaagttccttatttgctcgg

SEQ ID NO: 5697 - DNA, 23 bp, Homo sapiens
tgttccctgcttgaagtacccgg

SEQ ID NO: 5698 - DNA, 23 bp, Homo sapiens
ctgtgaagctctaaaacaacagg

SEQ ID NO: 5699 - DNA, 23 bp, Homo sapiens
acatttggaaactctgtaaaggg

SEQ ID NO: 5700 - DNA, 23 bp, Homo sapiens
tattaagaatatcatgaaaaggg

SEQ ID NO: 5701 - DNA, 23 bp, Homo sapiens
cattcattgccaacttaaaaggg

SEQ ID NO: 5702 - DNA, 23 bp, Homo sapiens
ttgtttttcaaattgaatgaagg

SEQ ID NO: 5703 - DNA, 23 bp, Homo sapiens
caagaatgaatgcattttggagg

SEQ ID NO: 5704 - DNA, 23 bp, Homo sapiens
ttttcttcatcaccaaatacagg

SEQ ID NO: 5705 - DNA, 23 bp, Homo sapiens
aaagtcttccatgtgagattcgg

SEQ ID NO: 5706 - DNA, 23 bp, Homo sapiens
atctctgtatcttcaggcactgg

SEQ ID NO: 5707 - DNA, 23 bp, Homo sapiens
tagactgtaatatccaatatggg

SEQ ID NO: 5708 - DNA, 23 bp, Homo sapiens
tgtactatgtgcaattaactagg

SEQ ID NO: 5709 - DNA, 23 bp, Homo sapiens
tctactaatccattgaactaagg

SEQ ID NO: 5710 - DNA, 23 bp, Homo sapiens
gtgatgccaaaacaaacaactgg

SEQ ID NO: 5711 - DNA, 23 bp, Homo sapiens
tttaatctgaagaaatccttggg

SEQ ID NO: 5712 - DNA, 23 bp, Homo sapiens
tatgttcctggttcaggaaacgg

SEQ ID NO: 5713 - DNA, 23 bp, Homo sapiens
tgaattgtatctcttcagaaagg

SEQ ID NO: 5714 - DNA, 23 bp, Homo sapiens
gagttatccagtatgagaatagg

SEQ ID NO: 5715 - DNA, 23 bp, Homo sapiens
ttatctttgatttcgattagagg

SEQ ID NO: 5716 - DNA, 23 bp, Homo sapiens
aaaaggtcattcccctttgaggg

SEQ ID NO: 5717 - DNA, 23 bp, Homo sapiens
aaatatgctctaaactatagtgg

SEQ ID NO: 5718 - DNA, 23 bp, Homo sapiens
cttcagtgggtcaaatcccatgg

SEQ ID NO: 5719 - DNA, 23 bp, Homo sapiens
ctaaaacccctcttggccttggg

SEQ ID NO: 5720 - DNA, 23 bp, Homo sapiens
aataatttgaattaaaaaaacgg

SEQ ID NO: 5721 - DNA, 23 bp, Homo sapiens
gcttgacttagctctgtgattgg

SEQ ID NO: 5722 - DNA, 23 bp, Homo sapiens
gttctggcagggactgaagttgg

SEQ ID NO: 5723 - DNA, 23 bp, Homo sapiens
tgacactaatctgtgccaaatgg

SEQ ID NO: 5724 - DNA, 23 bp, Homo sapiens
tgatctccaactctgacaatggg

SEQ ID NO: 5725 - DNA, 23 bp, Homo sapiens
atactgttaaacacaaaatcagg

SEQ ID NO: 5726 - DNA, 23 bp, Homo sapiens
ttaaaatgttcaatggtagttgg

SEQ ID NO: 5727 - DNA, 23 bp, Homo sapiens
gctgcatattatattttccatgg

SEQ ID NO: 5728 - DNA, 23 bp, Homo sapiens
caattcttcttgctaaggcctgg

SEQ ID NO: 5729 - DNA, 23 bp, Homo sapiens
tatgccactcttaaagccttggg

SEQ ID NO: 5730 - DNA, 23 bp, Homo sapiens
cttagtttgcactcatcacctgg

SEQ ID NO: 5731 - DNA, 23 bp, Homo sapiens
cttttcaaatttttaccaaaagg

SEQ ID NO: 5732 - DNA, 23 bp, Homo sapiens
atctgcatttaatcaaccctggg

SEQ ID NO: 5733 - DNA, 23 bp, Homo sapiens
tagataatctacagaacaaatgg

SEQ ID NO: 5734 - DNA, 23 bp, Homo sapiens
atttgtgcttgtcattaagctgg

SEQ ID NO: 5735 - DNA, 23 bp, Homo sapiens
ctgctcttttcccttctgtaggg

SEQ ID NO: 5736 - DNA, 23 bp, Homo sapiens
tcttttccagttcaacaggctgg

SEQ ID NO: 5737 - DNA, 23 bp, Homo sapiens
attatctttgaagaactcttggg

SEQ ID NO: 5738 - DNA, 23 bp, Homo sapiens
gtactcttgctctcaagctctgg

SEQ ID NO: 5739 - DNA, 23 bp, Homo sapiens
cccccctgcctgcttctcatagg

SEQ ID NO: 5740 - DNA, 23 bp, Homo sapiens
tgttgtgctttggtttaccttgg

SEQ ID NO: 5741 - DNA, 23 bp, Homo sapiens
ctcaaacctgagtaataaacagg

SEQ ID NO: 5742 - DNA, 23 bp, Homo sapiens
gagatcctgtatcgtcatattgg

SEQ ID NO: 5743 - DNA, 23 bp, Homo sapiens
ttaatatcagagttacccttagg

SEQ ID NO: 5744 - DNA, 23 bp, Homo sapiens
tctgttaccattactgctgtggg

SEQ ID NO: 5745 - DNA, 23 bp, Homo sapiens
gatagatgcacatcaacttaagg

SEQ ID NO: 5746 - DNA, 23 bp, Homo sapiens
cttctcaagctccttgtaagtgg

SEQ ID NO: 5747 - DNA, 23 bp, Homo sapiens
ctacactataagataaatgtagg

SEQ ID NO: 5748 - DNA, 23 bp, Homo sapiens
ttgggcgtcaaggttgataaggg

SEQ ID NO: 5749 - DNA, 23 bp, Homo sapiens
tgtgcacacacaacacattacgg

SEQ ID NO: 5750 - DNA, 23 bp, Homo sapiens
gcttgccagtttttttcagtggg

SEQ ID NO: 5751 - DNA, 23 bp, Homo sapiens
ttaggagcaattttattggcagg

SEQ ID NO: 5752 - DNA, 23 bp, Homo sapiens
ctatgccctcctcatcctactgg

SEQ ID NO: 5753 - DNA, 23 bp, Homo sapiens
gcatgaagcattagtggtggtgg

SEQ ID NO: 5754 - DNA, 23 bp, Homo sapiens
tgaagccaagatgaggtaaaggg

SEQ ID NO: 5755 - DNA, 23 bp, Homo sapiens
aggaacctcaaatcagactatgg

SEQ ID NO: 5756 - DNA, 23 bp, Homo sapiens
gatgaattgtacatgaaatcagg

SEQ ID NO: 5757 - DNA, 23 bp, Homo sapiens
taaattgccatggaaatcatagg

SEQ ID NO: 5758 - DNA, 23 bp, Homo sapiens
cttatacagatgtagagcttagg

SEQ ID NO: 5759 - DNA, 23 bp, Homo sapiens
atctctcccccttagacaaccgg

SEQ ID NO: 5760 - DNA, 23 bp, Homo sapiens
tgaacgatggtgctcccctttgg

SEQ ID NO: 5761 - DNA, 23 bp, Homo sapiens
ttcttcttccatgcctgtaaggg

SEQ ID NO: 5762 - DNA, 23 bp, Homo sapiens
tcatgtttgtttacctgcaatgg

SEQ ID NO: 5763 - DNA, 23 bp, Homo sapiens
tttcttctctgcaatttccctgg

SEQ ID NO: 5764 - DNA, 23 bp, Homo sapiens
aattctatagagtaagttgcagg

SEQ ID NO: 5765 - DNA, 23 bp, Homo sapiens
tagtatgaaataaagaaatacgg

SEQ ID NO: 5766 - DNA, 23 bp, Homo sapiens
ttagccttcatttccatcactgg

SEQ ID NO: 5767 - DNA, 23 bp, Homo sapiens
tttcagaattagttgccctatgg

SEQ ID NO: 5768 - DNA, 23 bp, Homo sapiens
atacacacaggcaatcaatatgg

SEQ ID NO: 5769 - DNA, 23 bp, Homo sapiens
tatttctcataaaaactcctagg

SEQ ID NO: 5770 - DNA, 23 bp, Homo sapiens
cctaccttagactaggcatatgg

SEQ ID NO: 5771 - DNA, 23 bp, Homo sapiens
gtaaatttaatgatgtctaaagg

SEQ ID NO: 5772 - DNA, 23 bp, Homo sapiens
aagacacaaggactacgtttggg

SEQ ID NO: 5773 - DNA, 23 bp, Homo sapiens
gtaacaagatctgaatgtttggg

SEQ ID NO: 5774 - DNA, 23 bp, Homo sapiens
ctatgccactcttaaagccttgg

SEQ ID NO: 5775 - DNA, 23 bp, Homo sapiens
tcttcattcttttcgtgtgaagg

SEQ ID NO: 5776 - DNA, 23 bp, Homo sapiens
atttacaagttaacgttcactgg

SEQ ID NO: 5777 - DNA, 23 bp, Homo sapiens
cttaagtatggggagggcggggg

SEQ ID NO: 5778 - DNA, 23 bp, Homo sapiens
tcaatctgaaatttaacataagg

SEQ ID NO: 5779 - DNA, 23 bp, Homo sapiens
aataggctgaaagctccaacagg

SEQ ID NO: 5780 - DNA, 23 bp, Homo sapiens
acaaatgaatcataaggtagagg

SEQ ID NO: 5781 - DNA, 23 bp, Homo sapiens
ctctcactgtcaattttgagtgg

SEQ ID NO: 5782 - DNA, 23 bp, Homo sapiens
atgctaatccaaaataataaggg

SEQ ID NO: 5783 - DNA, 23 bp, Homo sapiens
gtttaaacagaacaaggaattgg

SEQ ID NO: 5784 - DNA, 23 bp, Homo sapiens
gtgttatgttctttttcccatgg

SEQ ID NO: 5785 - DNA, 23 bp, Homo sapiens
tatttgaataaatatcataaggg

SEQ ID NO: 5786 - DNA, 23 bp, Homo sapiens
aggaacaagcacgattttaaggg

SEQ ID NO: 5787 - DNA, 23 bp, Homo sapiens
atatgttgttatacagtcattgg

SEQ ID NO: 5788 - DNA, 23 bp, Homo sapiens
ctacggagagtacttttcatagg

SEQ ID NO: 5789 - DNA, 23 bp, Homo sapiens
acagttcactgaaacttaaaggg

SEQ ID NO: 5790 - DNA, 23 bp, Homo sapiens
tgagttgtgataaatgataatgg

SEQ ID NO: 5791 - DNA, 23 bp, Homo sapiens
ttacattcattgtaacctcttgg

SEQ ID NO: 5792 - DNA, 23 bp, Homo sapiens
ataaaaacaaaacagttagatgg

SEQ ID NO: 5793 - DNA, 23 bp, Homo sapiens
gtcttagtataggggacattggg

SEQ ID NO: 5794 - DNA, 23 bp, Homo sapiens
gtacatagtcactttataagagg

SEQ ID NO: 5795 - DNA, 23 bp, Homo sapiens
taacttagagatataataagtgg

SEQ ID NO: 5796 - DNA, 23 bp, Homo sapiens
gttttatcccaccagaaattggg

SEQ ID NO: 5797 - DNA, 23 bp, Homo sapiens
cattacataatgacaaaaatggg

SEQ ID NO: 5798 - DNA, 23 bp, Homo sapiens
aatgtagaagcgaaatttgaggg

SEQ ID NO: 5799 - DNA, 23 bp, Homo sapiens
gctgttattcaggtgcttgaagg

SEQ ID NO: 5800 - DNA, 23 bp, Homo sapiens
ttataatttacaagttcttaggg

SEQ ID NO: 5801 - DNA, 23 bp, Homo sapiens
gacagtgaagactcaataacagg

SEQ ID NO: 5802 - DNA, 23 bp, Homo sapiens
tcctgcctattaggaagaatggg

SEQ ID NO: 5803 - DNA, 23 bp, Homo sapiens
agtatccacacacatttcattgg

SEQ ID NO: 5804 - DNA, 23 bp, Homo sapiens
agtatgttatcctcaggctttgg

SEQ ID NO: 5805 - DNA, 23 bp, Homo sapiens
tacaacatttgaacgtaaaacgg

SEQ ID NO: 5806 - DNA, 23 bp, Homo sapiens
tccttttgcttgttctggcaggg

SEQ ID NO: 5807 - DNA, 23 bp, Homo sapiens
gtagagagggatttgggctgagg

SEQ ID NO: 5808 - DNA, 23 bp, Homo sapiens
gctatgacctattctcatactgg

SEQ ID NO: 5809 - DNA, 23 bp, Homo sapiens
attgtaggtcccatttgtaatgg

SEQ ID NO: 5810 - DNA, 23 bp, Homo sapiens
caaaaaatagagaaccttgtagg

SEQ ID NO: 5811 - DNA, 23 bp, Homo sapiens
ataactttcctaaatatcctagg

SEQ ID NO: 5812 - DNA, 23 bp, Homo sapiens
ccctcatatcttcttctgctggg

SEQ ID NO: 5813 - DNA, 23 bp, Homo sapiens
tctgtttttgatgttgcagatgg

SEQ ID NO: 5814 - DNA, 23 bp, Homo sapiens
ctttttccatatcatttcctggg

SEQ ID NO: 5815 - DNA, 23 bp, Homo sapiens
atatattgtcccaactgaacagg

SEQ ID NO: 5816 - DNA, 23 bp, Homo sapiens
gggatcctgtaccctgagatagg

SEQ ID NO: 5817 - DNA, 23 bp, Homo sapiens
aggcacttcagcaggatataggg

SEQ ID NO: 5818 - DNA, 23 bp, Homo sapiens
tttgctcaggaattatactaagg

SEQ ID NO: 5819 - DNA, 23 bp, Homo sapiens
gctaacaataaaatactaatggg

SEQ ID NO: 5820 - DNA, 23 bp, Homo sapiens
ggtgtagtagagaggaagatagg

SEQ ID NO: 5821 - DNA, 23 bp, Homo sapiens
gactgcggcagactgttcttggg

SEQ ID NO: 5822 - DNA, 23 bp, Homo sapiens
aaggttttgagcagaataaaggg

SEQ ID NO: 5823 - DNA, 23 bp, Homo sapiens
tgattcatttgttattcctaggg

SEQ ID NO: 5824 - DNA, 23 bp, Homo sapiens
tctccactttccgcagcaaatgg

SEQ ID NO: 5825 - DNA, 23 bp, Homo sapiens
gacaagcaagagataaatatcgg

SEQ ID NO: 5826 - DNA, 23 bp, Homo sapiens
ggcatgatcaaggcagttacggg

SEQ ID NO: 5827 - DNA, 23 bp, Homo sapiens
ggagggactttttttggagttgg

SEQ ID NO: 5828 - DNA, 23 bp, Homo sapiens
cctaatttatttctgcggcttgg

SEQ ID NO: 5829 - DNA, 23 bp, Homo sapiens
aagacactgaagaaagaataggg

SEQ ID NO: 5830 - DNA, 23 bp, Homo sapiens
ccttttgtccaaaattccattgg

SEQ ID NO: 5831 - DNA, 23 bp, Homo sapiens
ttaaatctaatacagtcgtttgg

SEQ ID NO: 5832 - DNA, 23 bp, Homo sapiens
tgtgggagtgcaagtcaataggg

SEQ ID NO: 5833 - DNA, 23 bp, Homo sapiens
tgtatgacctttatacactttgg

SEQ ID NO: 5834 - DNA, 23 bp, Homo sapiens
aaaaccatcatatcactcattgg

SEQ ID NO: 5835 - DNA, 23 bp, Homo sapiens
ccaggcatcactgtttatgatgg

SEQ ID NO: 5836 - DNA, 23 bp, Homo sapiens
tctcactgtcaattttgagtggg

SEQ ID NO: 5837 - DNA, 23 bp, Homo sapiens
aattttgcatgaagcattagtgg

SEQ ID NO: 5838 - DNA, 23 bp, Homo sapiens
tgataaaatggggattttagtgg

SEQ ID NO: 5839 - DNA, 23 bp, Homo sapiens
ttcagattaaaatattaaatggg

SEQ ID NO: 5840 - DNA, 23 bp, Homo sapiens
ttaagttcagattcaagaaaagg

SEQ ID NO: 5841 - DNA, 23 bp, Homo sapiens
gctgaatattgcgacaatatagg

SEQ ID NO: 5842 - DNA, 23 bp, Homo sapiens
ataatttcatagtaataagtagg

SEQ ID NO: 5843 - DNA, 23 bp, Homo sapiens
actgctgtttattcaaaaagagg

SEQ ID NO: 5844 - DNA, 23 bp, Homo sapiens
gtttgatgtagagaaataagagg

SEQ ID NO: 5845 - DNA, 23 bp, Homo sapiens
tgtcagctcctagatcttccagg

SEQ ID NO: 5846 - DNA, 23 bp, Homo sapiens
gctgcttttgagctatttgaagg

SEQ ID NO: 5847 - DNA, 23 bp, Homo sapiens
ttactgctgaaattgaatatggg

SEQ ID NO: 5848 - DNA, 23 bp, Homo sapiens
tatagctttagttttcaaaaggg

SEQ ID NO: 5849 - DNA, 23 bp, Homo sapiens
attcaggcctgagatacatttgg

SEQ ID NO: 5850 - DNA, 23 bp, Homo sapiens
tttacttcttccattcaattggg

SEQ ID NO: 5851 - DNA, 23 bp, Homo sapiens
ttttgttttgattattcggttgg

SEQ ID NO: 5852 - DNA, 23 bp, Homo sapiens
gataaaggcagaaatagaattgg

SEQ ID NO: 5853 - DNA, 23 bp, Homo sapiens
gcagttgctcctggacagtatgg

SEQ ID NO: 5854 - DNA, 23 bp, Homo sapiens
aaccttctctgttgtggtggcgg

SEQ ID NO: 5855 - DNA, 23 bp, Homo sapiens
tgatccccactgaaaaaaactgg

SEQ ID NO: 5856 - DNA, 23 bp, Homo sapiens
cacccagtgcatgttttcatagg

SEQ ID NO: 5857 - DNA, 23 bp, Homo sapiens
gatataataaaaactattgcagg

SEQ ID NO: 5858 - DNA, 23 bp, Homo sapiens
cctcctccactccaaatcttagg

SEQ ID NO: 5859 - DNA, 23 bp, Homo sapiens
gatgtttttgaaataggttaagg

SEQ ID NO: 5860 - DNA, 23 bp, Homo sapiens
cttctggctgtgagaggcatagg

SEQ ID NO: 5861 - DNA, 23 bp, Homo sapiens
gctggactctaagttctataggg

SEQ ID NO: 5862 - DNA, 23 bp, Homo sapiens
agaatatcgtctattctttgtgg

SEQ ID NO: 5863 - DNA, 23 bp, Homo sapiens
ggtaatattagacgagcaaaagg

SEQ ID NO: 5864 - DNA, 23 bp, Homo sapiens
agtcatcatcaaaaaacaatagg

SEQ ID NO: 5865 - DNA, 23 bp, Homo sapiens
tagttcttgctatcattaagagg

SEQ ID NO: 5866 - DNA, 23 bp, Homo sapiens
ctttggggacccctgctttgggg

SEQ ID NO: 5867 - DNA, 23 bp, Homo sapiens
gtattgtatgaaagcttcattgg

SEQ ID NO: 5868 - DNA, 23 bp, Homo sapiens
ttttgcctgcttctgtaaagtgg

SEQ ID NO: 5869 - DNA, 23 bp, Homo sapiens
gacatattctagctacttgatgg

SEQ ID NO: 5870 - DNA, 23 bp, Homo sapiens
caaaatccagataagcctttggg

SEQ ID NO: 5871 - DNA, 23 bp, Homo sapiens
tttggtgtttccaatgtctaggg

SEQ ID NO: 5872 - DNA, 23 bp, Homo sapiens
agtcatgtgccatatgtaaatgg

SEQ ID NO: 5873 - DNA, 23 bp, Homo sapiens
aagttatttttactccataaggg

SEQ ID NO: 5874 - DNA, 23 bp, Homo sapiens
acagagatatgctcagtgttagg

SEQ ID NO: 5875 - DNA, 23 bp, Homo sapiens
ctatggggtaaaaatgcaatagg

SEQ ID NO: 5876 - DNA, 23 bp, Homo sapiens
aatgattttggggctcataatgg

SEQ ID NO: 5877 - DNA, 23 bp, Homo sapiens
agtaaacatatatctctgatagg

SEQ ID NO: 5878 - DNA, 23 bp, Homo sapiens
ttagaatttgtttttactgtggg

SEQ ID NO: 5879 - DNA, 23 bp, Homo sapiens
ggtttactgacttagatgatagg

SEQ ID NO: 5880 - DNA, 23 bp, Homo sapiens
gtctttatctcaatgccattagg

SEQ ID NO: 5881 - DNA, 23 bp, Homo sapiens
aggacctatgagagatactttgg

SEQ ID NO: 5882 - DNA, 23 bp, Homo sapiens
acttctggctcccttccctcagg

SEQ ID NO: 5883 - DNA, 23 bp, Homo sapiens
tgataacccctttagcaaactgg

SEQ ID NO: 5884 - DNA, 23 bp, Homo sapiens
ggtcatatggtcccaatataggg

SEQ ID NO: 5885 - DNA, 23 bp, Homo sapiens
aattccatatgcctagtctaagg

SEQ ID NO: 5886 - DNA, 23 bp, Homo sapiens
acatggtttatgaaagaaatggg

SEQ ID NO: 5887 - DNA, 23 bp, Homo sapiens
agatgtagacgttatctataggg

SEQ ID NO: 5888 - DNA, 23 bp, Homo sapiens
tgcttccagtttaaaaaaaacgg

SEQ ID NO: 5889 - DNA, 23 bp, Homo sapiens
ataagctagactattaagattgg

SEQ ID NO: 5890 - DNA, 23 bp, Homo sapiens
gataaattcagcttatgttaagg

SEQ ID NO: 5891 - DNA, 23 bp, Homo sapiens
gagggactgtactaatttgtagg

SEQ ID NO: 5892 - DNA, 23 bp, Homo sapiens
aaaagcataggactacaaaatgg

SEQ ID NO: 5893 - DNA, 23 bp, Homo sapiens
accatcgccatcattgactatgg

SEQ ID NO: 5894 - DNA, 23 bp, Homo sapiens
gctaatctgttcagagtcatagg

SEQ ID NO: 5895 - DNA, 23 bp, Homo sapiens
agttcccactaggaaatagtagg

SEQ ID NO: 5896 - DNA, 23 bp, Homo sapiens
ggcagtgcctattcactaactgg

SEQ ID NO: 5897 - DNA, 23 bp, Homo sapiens
tcatttctcttcaaagccttagg

SEQ ID NO: 5898 - DNA, 23 bp, Homo sapiens
gtcctcaatcaaacactagatgg

SEQ ID NO: 5899 - DNA, 23 bp, Homo sapiens
cacagaccagaaacagaaattgg

SEQ ID NO: 5900 - DNA, 23 bp, Homo sapiens
gtatataagggaatcattacagg

SEQ ID NO: 5901 - DNA, 23 bp, Homo sapiens
ctgaaacgtattgatccctttgg

SEQ ID NO: 5902 - DNA, 23 bp, Homo sapiens
ttacatggcatccagagaacagg

SEQ ID NO: 5903 - DNA, 23 bp, Homo sapiens
acacattaccaattttaaatggg

SEQ ID NO: 5904 - DNA, 23 bp, Homo sapiens
tcataatatttagttgataaggg

SEQ ID NO: 5905 - DNA, 23 bp, Homo sapiens
ggttggtgatctttgttgtatgg

SEQ ID NO: 5906 - DNA, 23 bp, Homo sapiens
gaaagactctgtaggtcaattgg

SEQ ID NO: 5907 - DNA, 23 bp, Homo sapiens
ctaacaacattagaatcattagg

SEQ ID NO: 5908 - DNA, 23 bp, Homo sapiens
tgtcaatgtttccataccttggg

SEQ ID NO: 5909 - DNA, 23 bp, Homo sapiens
tttttatatttgttgttagtggg

SEQ ID NO: 5910 - DNA, 23 bp, Homo sapiens
ttttaatcgtggaagtttaaggg

SEQ ID NO: 5911 - DNA, 23 bp, Homo sapiens
gtaaataaaatataacaaatcgg

SEQ ID NO: 5912 - DNA, 23 bp, Homo sapiens
gaagacactgaagaaagaatagg

SEQ ID NO: 5913 - DNA, 23 bp, Homo sapiens
gcagagtatggtttttaaaaggg

SEQ ID NO: 5914 - DNA, 23 bp, Homo sapiens
ttttaatctgaagaaatccttgg

SEQ ID NO: 5915 - DNA, 23 bp, Homo sapiens
tttatgtcattggttttgcctgg

SEQ ID NO: 5916 - DNA, 23 bp, Homo sapiens
ggaacctaggaaataggaattgg

SEQ ID NO: 5917 - DNA, 23 bp, Homo sapiens
tttctactctaaattgagtcagg

SEQ ID NO: 5918 - DNA, 23 bp, Homo sapiens
gatctggcttaataatatatagg

SEQ ID NO: 5919 - DNA, 23 bp, Homo sapiens
atagatttctggagtaaaacagg

SEQ ID NO: 5920 - DNA, 23 bp, Homo sapiens
ataaccatcttataaatattcgg

SEQ ID NO: 5921 - DNA, 23 bp, Homo sapiens
aatagagtaacatacatattggg

SEQ ID NO: 5922 - DNA, 23 bp, Homo sapiens
taatgtagcgaagggtactatgg

SEQ ID NO: 5923 - DNA, 23 bp, Homo sapiens
gaagatctatttcaacttgcggg

SEQ ID NO: 5924 - DNA, 23 bp, Homo sapiens
gctgttgtaaaggagattacagg

SEQ ID NO: 5925 - DNA, 23 bp, Homo sapiens
tcttaactaatcacattgcttgg

SEQ ID NO: 5926 - DNA, 23 bp, Homo sapiens
ctattcagaagaagaaaaaatgg

SEQ ID NO: 5927 - DNA, 23 bp, Homo sapiens
ttagcatattaactcctttgagg

SEQ ID NO: 5928 - DNA, 23 bp, Homo sapiens
gctttacattataaattgtatgg

SEQ ID NO: 5929 - DNA, 23 bp, Homo sapiens
aataagtaggcgaaaccatttgg

SEQ ID NO: 5930 - DNA, 23 bp, Homo sapiens
tccaggtgataacatttaacagg

SEQ ID NO: 5931 - DNA, 23 bp, Homo sapiens
tattctgttccttagcctaaagg

SEQ ID NO: 5932 - DNA, 23 bp, Homo sapiens
ttgttttgctttactttggtagg

SEQ ID NO: 5933 - DNA, 23 bp, Homo sapiens
gaacatttatatccctaataggg

SEQ ID NO: 5934 - DNA, 23 bp, Homo sapiens
tcaataggattttctcagaatgg

SEQ ID NO: 5935 - DNA, 23 bp, Homo sapiens
ccaaaagatgaaaatatgtttgg

SEQ ID NO: 5936 - DNA, 23 bp, Homo sapiens
gcaagtacttgatttaaattggg

SEQ ID NO: 5937 - DNA, 23 bp, Homo sapiens
tctctttctgcgaggacctatgg

SEQ ID NO: 5938 - DNA, 23 bp, Homo sapiens
tgacagatattgtgatttaaggg

SEQ ID NO: 5939 - DNA, 23 bp, Homo sapiens
agagaagagaggagtcctatagg

SEQ ID NO: 5940 - DNA, 23 bp, Homo sapiens
agtctgtctttagcactaaccgg

SEQ ID NO: 5941 - DNA, 23 bp, Homo sapiens
ttgaaaggaattctgcagatagg

SEQ ID NO: 5942 - DNA, 23 bp, Homo sapiens
tcttaagtatggggagggcgggg

SEQ ID NO: 5943 - DNA, 23 bp, Homo sapiens
gcttactgtctactttttcaggg

SEQ ID NO: 5944 - DNA, 23 bp, Homo sapiens
aactgtatgaaagagcctattgg

SEQ ID NO: 5945 - DNA, 23 bp, Homo sapiens
tggagtcttgttgcattcctggg

SEQ ID NO: 5946 - DNA, 23 bp, Homo sapiens
ttagacacttttgaagaagatgg

SEQ ID NO: 5947 - DNA, 23 bp, Homo sapiens
gaccagctcccagaaaaataagg

SEQ ID NO: 5948 - DNA, 23 bp, Homo sapiens
agtagaatagaaagatatatagg

SEQ ID NO: 5949 - DNA, 23 bp, Homo sapiens
cactgtttatgatggattaaggg

SEQ ID NO: 5950 - DNA, 23 bp, Homo sapiens
attcattttaaaactcttagtgg

SEQ ID NO: 5951 - DNA, 23 bp, Homo sapiens
ggcttcttctttgggctgtaggg

SEQ ID NO: 5952 - DNA, 23 bp, Homo sapiens
tcacaaagtttcccagaaacagg

SEQ ID NO: 5953 - DNA, 23 bp, Homo sapiens
gtgtgcccattcttcctaatagg

SEQ ID NO: 5954 - DNA, 23 bp, Homo sapiens
agagggtgcagagagctaaaagg

SEQ ID NO: 5955 - DNA, 23 bp, Homo sapiens
cctcctgcacaccaaagtttagg

SEQ ID NO: 5956 - DNA, 23 bp, Homo sapiens
gcagggacaatgatgcaaattgg

SEQ ID NO: 5957 - DNA, 23 bp, Homo sapiens
ctgcaagacaagcaaaatatagg

SEQ ID NO: 5958 - DNA, 23 bp, Homo sapiens
cttttttcatccgtcatcttcgg

SEQ ID NO: 5959 - DNA, 23 bp, Homo sapiens
aatgagattttgtaaccataagg

SEQ ID NO: 5960 - DNA, 23 bp, Homo sapiens
ctgcttttcaggaagtaacttgg

SEQ ID NO: 5961 - DNA, 23 bp, Homo sapiens
agaataggatggtttgtaaaggg

SEQ ID NO: 5962 - DNA, 23 bp, Homo sapiens
tttttttttaatcagccaatagg

SEQ ID NO: 5963 - DNA, 23 bp, Homo sapiens
gcaccaatcttttaaaaagttgg

SEQ ID NO: 5964 - DNA, 23 bp, Homo sapiens
gttctttctttggggatatgagg

SEQ ID NO: 5965 - DNA, 23 bp, Homo sapiens
tttctcctaaaacatcttcctgg

SEQ ID NO: 5966 - DNA, 23 bp, Homo sapiens
ggagagtgagaacgaggatgagg

SEQ ID NO: 5967 - DNA, 23 bp, Homo sapiens
cttcctgagcttgaaatgaatgg

SEQ ID NO: 5968 - DNA, 23 bp, Homo sapiens
gctgaggttgagagctttcaagg

SEQ ID NO: 5969 - DNA, 23 bp, Homo sapiens
agaagttcaaaacaaggctttgg

SEQ ID NO: 5970 - DNA, 23 bp, Homo sapiens
aggaaaattccaaagttaaaggg

SEQ ID NO: 5971 - DNA, 23 bp, Homo sapiens
gaataatctttccaaataaaggg

SEQ ID NO: 5972 - DNA, 23 bp, Homo sapiens
cctgatgcttttgcaataaaggg

SEQ ID NO: 5973 - DNA, 23 bp, Homo sapiens
agccacatatagttgacatttgg

SEQ ID NO: 5974 - DNA, 23 bp, Homo sapiens
tactggttcctgaactcaattgg

SEQ ID NO: 5975 - DNA, 23 bp, Homo sapiens
cagctacaagacaaccttgtagg

SEQ ID NO: 5976 - DNA, 23 bp, Homo sapiens
gcactgactcatggtttaaaggg

SEQ ID NO: 5977 - DNA, 23 bp, Homo sapiens
atgaccttctgattacaaaaagg

SEQ ID NO: 5978 - DNA, 23 bp, Homo sapiens
taggtacctgacatttcaatagg

SEQ ID NO: 5979 - DNA, 23 bp, Homo sapiens
cttttaatccagatacttagtgg

SEQ ID NO: 5980 - DNA, 23 bp, Homo sapiens
gatgcagaatcagtcttaagagg

SEQ ID NO: 5981 - DNA, 23 bp, Homo sapiens
ttaaaacaatgccattatagtgg

SEQ ID NO: 5982 - DNA, 23 bp, Homo sapiens
ttcttaccaaagaaacaaaaagg

SEQ ID NO: 5983 - DNA, 23 bp, Homo sapiens
ctgcccaccaagaagctataagg

SEQ ID NO: 5984 - DNA, 23 bp, Homo sapiens
tgatagctttgattttcaatagg

SEQ ID NO: 5985 - DNA, 23 bp, Homo sapiens
tgtaatgtccttaactcttaggg

SEQ ID NO: 5986 - DNA, 23 bp, Homo sapiens
atgctttgtgtgttgttgctagg

SEQ ID NO: 5987 - DNA, 23 bp, Homo sapiens
gaattaatcttatctagaaatgg

SEQ ID NO: 5988 - DNA, 23 bp, Homo sapiens
tacttctgtgtactttttgtggg

SEQ ID NO: 5989 - DNA, 23 bp, Homo sapiens
gtttaaaactgtagtataaaggg

SEQ ID NO: 5990 - DNA, 23 bp, Homo sapiens
tttatagccctttcttttgaggg

SEQ ID NO: 5991 - DNA, 23 bp, Homo sapiens
tattaatattcccaattgaatgg

SEQ ID NO: 5992 - DNA, 23 bp, Homo sapiens
ctgtgggagtgcaagtcaatagg

SEQ ID NO: 5993 - DNA, 23 bp, Homo sapiens
aggaggctagctaacataatagg

SEQ ID NO: 5994 - DNA, 23 bp, Homo sapiens
attggcatacagagtgtaatagg

SEQ ID NO: 5995 - DNA, 23 bp, Homo sapiens
ggttgtctcagcacaacatttgg

SEQ ID NO: 5996 - DNA, 23 bp, Homo sapiens
agtggtatggtaccataaaaagg

SEQ ID NO: 5997 - DNA, 23 bp, Homo sapiens
ataaatacttagtgtccaatagg

SEQ ID NO: 5998 - DNA, 23 bp, Homo sapiens
tattaattatttgaatgctttgg

SEQ ID NO: 5999 - DNA, 23 bp, Homo sapiens
ggatattaacattttttaaaggg

SEQ ID NO: 6000 - DNA, 23 bp, Homo sapiens
tgaatgagaaaggtatcatttgg

SEQ ID NO: 6001 - DNA, 23 bp, Homo sapiens
ctcaatgtcttcctaaactttgg

SEQ ID NO: 6002 - DNA, 23 bp, Homo sapiens
actaaggaaaacaggctataggg

SEQ ID NO: 6003 - DNA, 23 bp, Homo sapiens
tatagtttataggctaataatgg

SEQ ID NO: 6004 - DNA, 23 bp, Homo sapiens
ctaccttcttggcatcaaacagg

SEQ ID NO: 6005 - DNA, 23 bp, Homo sapiens
tttgtttcctctactgcaaatgg

SEQ ID NO: 6006 - DNA, 23 bp, Homo sapiens
attcatttcccaaggctcattgg

SEQ ID NO: 6007 - DNA, 23 bp, Homo sapiens
aatcatccatgtaggacaatagg

SEQ ID NO: 6008 - DNA, 23 bp, Homo sapiens
gagacatcaaatctagataatgg

SEQ ID NO: 6009 - DNA, 23 bp, Homo sapiens
aaagcagtacatatgcaaaaagg

SEQ ID NO: 6010 - DNA, 23 bp, Homo sapiens
taaaaaataaaagagctaaaagg

SEQ ID NO: 6011 - DNA, 23 bp, Homo sapiens
tttctttgtggaaggtcatatgg

SEQ ID NO: 6012 - DNA, 23 bp, Homo sapiens
tagtattctgccaaaataaaggg

SEQ ID NO: 6013 - DNA, 23 bp, Homo sapiens
ataatcttttccagttcaacagg

SEQ ID NO: 6014 - DNA, 23 bp, Homo sapiens
tatgaggtagagagggatttggg

SEQ ID NO: 6015 - DNA, 23 bp, Homo sapiens
gtattgttcaatcattttgcagg

SEQ ID NO: 6016 - DNA, 23 bp, Homo sapiens
cattccaattcctatttcctagg

SEQ ID NO: 6017 - DNA, 23 bp, Homo sapiens
gctaaaacccctcttggccttgg

SEQ ID NO: 6018 - DNA, 23 bp, Homo sapiens
aattgaatggaagaagtaaaagg

SEQ ID NO: 6019 - DNA, 23 bp, Homo sapiens
gtggcttgctcacagtaaatagg

SEQ ID NO: 6020 - DNA, 23 bp, Homo sapiens
tcacagctagtaatgtaaaatgg

SEQ ID NO: 6021 - DNA, 23 bp, Homo sapiens
ttacacccctagggtataatagg

SEQ ID NO: 6022 - DNA, 23 bp, Homo sapiens
tagcaacctttaaatttaaaggg

SEQ ID NO: 6023 - DNA, 23 bp, Homo sapiens
atagtcttctcaattctatctgg

SEQ ID NO: 6024 - DNA, 23 bp, Homo sapiens
gttaagaagccttagttcaatgg

SEQ ID NO: 6025 - DNA, 23 bp, Homo sapiens
cattttatagctttatagatagg

SEQ ID NO: 6026 - DNA, 23 bp, Homo sapiens
gaattacccaaaaatataaaagg

SEQ ID NO: 6027 - DNA, 23 bp, Homo sapiens
attgctatagttaagagtttggg

SEQ ID NO: 6028 - DNA, 23 bp, Homo sapiens
gcctcctctttgaataaatcagg

SEQ ID NO: 6029 - DNA, 23 bp, Homo sapiens
atcagagtcccggtagaaactgg

SEQ ID NO: 6030 - DNA, 23 bp, Homo sapiens
gttgtcttggatacattaaatgg

SEQ ID NO: 6031 - DNA, 23 bp, Homo sapiens
tttgtctctaaataaggtttagg

SEQ ID NO: 6032 - DNA, 23 bp, Homo sapiens
tgttttataattctccaataggg

SEQ ID NO: 6033 - DNA, 23 bp, Homo sapiens
tgtttgagaaaaaattttatggg

SEQ ID NO: 6034 - DNA, 23 bp, Homo sapiens
catggaagactcaagttatacgg

SEQ ID NO: 6035 - DNA, 23 bp, Homo sapiens
tcatttccagaaagacaatatgg

SEQ ID NO: 6036 - DNA, 23 bp, Homo sapiens
tatagtatctggaagcaaatagg

SEQ ID NO: 6037 - DNA, 23 bp, Homo sapiens
gggctcctgacgcttcttgcagg

SEQ ID NO: 6038 - DNA, 23 bp, Homo sapiens
taactggtacgtctccttatagg

SEQ ID NO: 6039 - DNA, 23 bp, Homo sapiens
cagtttatctttccagtaagagg

SEQ ID NO: 6040 - DNA, 23 bp, Homo sapiens
ataaaattgctcctaattgtagg

SEQ ID NO: 6041 - DNA, 23 bp, Homo sapiens
ggggcatctcagtcctaaattgg

SEQ ID NO: 6042 - DNA, 23 bp, Homo sapiens
ttttagagctttcttcataaagg

SEQ ID NO: 6043 - DNA, 23 bp, Homo sapiens
cttttttcctattatttactggg

SEQ ID NO: 6044 - DNA, 23 bp, Homo sapiens
gagagggagtaaaggattatagg

SEQ ID NO: 6045 - DNA, 23 bp, Homo sapiens
cagtctcaggacaagtagatagg

SEQ ID NO: 6046 - DNA, 23 bp, Homo sapiens
ttactcatcaccctgttctctgg

SEQ ID NO: 6047 - DNA, 23 bp, Homo sapiens
tcattgaattaatcactaatagg

SEQ ID NO: 6048 - DNA, 23 bp, Homo sapiens
ttgcagctcctcatatttgatgg

SEQ ID NO: 6049 - DNA, 23 bp, Homo sapiens
tcatttcctgcctacctgattgg

SEQ ID NO: 6050 - DNA, 23 bp, Homo sapiens
tttttattatatctgcactatgg

SEQ ID NO: 6051 - DNA, 23 bp, Homo sapiens
tccatgagaaccaaaactattgg

SEQ ID NO: 6052 - DNA, 23 bp, Homo sapiens
ggactcttctcatccaattccgg

SEQ ID NO: 6053 - DNA, 23 bp, Homo sapiens
ggagcacagccttttgaaactgg

SEQ ID NO: 6054 - DNA, 23 bp, Homo sapiens
attgttgtctgatttattaccgg

SEQ ID NO: 6055 - DNA, 23 bp, Homo sapiens
tggccctacagctaagaaaatgg

SEQ ID NO: 6056 - DNA, 23 bp, Homo sapiens
atatctctagtctctacttctgg

SEQ ID NO: 6057 - DNA, 23 bp, Homo sapiens
tgaagaagatgggaatttagagg

SEQ ID NO: 6058 - DNA, 23 bp, Homo sapiens
tctgaaatcatatttcgatttgg

SEQ ID NO: 6059 - DNA, 23 bp, Homo sapiens
atcttacatgagatacttagagg

SEQ ID NO: 6060 - DNA, 23 bp, Homo sapiens
cttgtactatgaaggatacttgg

SEQ ID NO: 6061 - DNA, 23 bp, Homo sapiens
gttttgtttttattccaaatagg

SEQ ID NO: 6062 - DNA, 23 bp, Homo sapiens
gctgagacaacctacttaaatgg

SEQ ID NO: 6063 - DNA, 23 bp, Homo sapiens
ttaattgttgaaacctataaagg

SEQ ID NO: 6064 - DNA, 23 bp, Homo sapiens
gtattattcttccacataatggg

SEQ ID NO: 6065 - DNA, 23 bp, Homo sapiens
gcagtggcagactagcttttggg

SEQ ID NO: 6066 - DNA, 23 bp, Homo sapiens
ttgtctcctgaaataataatagg

SEQ ID NO: 6067 - DNA, 23 bp, Homo sapiens
atagacatagagacctaaaatgg

SEQ ID NO: 6068 - DNA, 23 bp, Homo sapiens
tcttaaagccttgggtttaaggg

SEQ ID NO: 6069 - DNA, 23 bp, Homo sapiens
tcccatgtccccccaactttggg

SEQ ID NO: 6070 - DNA, 23 bp, Homo sapiens
tcttgacaattccttttagaagg

SEQ ID NO: 6071 - DNA, 23 bp, Homo sapiens
ttcaaggtatgatcttaaaaagg

SEQ ID NO: 6072 - DNA, 23 bp, Homo sapiens
ttacttttgtaatttaataaggg

SEQ ID NO: 6073 - DNA, 23 bp, Homo sapiens
atagctcttagtaaatagtatgg

SEQ ID NO: 6074 - DNA, 23 bp, Homo sapiens
ccaaaatgcaaccattgtttagg

SEQ ID NO: 6075 - DNA, 23 bp, Homo sapiens
gctttgatttctatattaacagg

SEQ ID NO: 6076 - DNA, 23 bp, Homo sapiens
ctagtgagatgctcattaactgg

SEQ ID NO: 6077 - DNA, 23 bp, Homo sapiens
cctatagattagaaaaaaatcgg

SEQ ID NO: 6078 - DNA, 23 bp, Homo sapiens
ccagttttagtaattgtataggg

SEQ ID NO: 6079 - DNA, 23 bp, Homo sapiens
ggtcatgtcaaactacttactgg

SEQ ID NO: 6080 - DNA, 23 bp, Homo sapiens
aatcaatcggccaagcaaaatgg

SEQ ID NO: 6081 - DNA, 23 bp, Homo sapiens
tgtgttctctaactatgattagg

SEQ ID NO: 6082 - DNA, 23 bp, Homo sapiens
tttgatatcctcagtaactatgg

SEQ ID NO: 6083 - DNA, 23 bp, Homo sapiens
gcaaagaaaatattcctaaaagg

SEQ ID NO: 6084 - DNA, 23 bp, Homo sapiens
tcaagactagtcttagtataggg

SEQ ID NO: 6085 - DNA, 23 bp, Homo sapiens
ccaagccgcagaaataaattagg

SEQ ID NO: 6086 - DNA, 23 bp, Homo sapiens
ggattatatgaataatgctttgg

SEQ ID NO: 6087 - DNA, 23 bp, Homo sapiens
tctcagacattacaaactttagg

SEQ ID NO: 6088 - DNA, 23 bp, Homo sapiens
gcctgactatcgtaaatttaggg

SEQ ID NO: 6089 - DNA, 23 bp, Homo sapiens
tatttcccaaattatcctatagg

SEQ ID NO: 6090 - DNA, 23 bp, Homo sapiens
atagtattctgccaaaataaagg

SEQ ID NO: 6091 - DNA, 23 bp, Homo sapiens
gggaagactaattaaaaaaatgg

SEQ ID NO: 6092 - DNA, 23 bp, Homo sapiens
gaagaaacccagtaaataatagg

SEQ ID NO: 6093 - DNA, 23 bp, Homo sapiens
ttagtattaccggttgtctaagg

SEQ ID NO: 6094 - DNA, 23 bp, Homo sapiens
aatgtattcttaacaagctttgg

SEQ ID NO: 6095 - DNA, 23 bp, Homo sapiens
gtatacacgaggctttttaaagg

SEQ ID NO: 6096 - DNA, 23 bp, Homo sapiens
ctttatctatgctttgctatagg

SEQ ID NO: 6097 - DNA, 23 bp, Homo sapiens
tctgtgccttgattaaaaaaagg

SEQ ID NO: 6098 - DNA, 23 bp, Homo sapiens
tttctgttgccaatttataatgg

SEQ ID NO: 6099 - DNA, 23 bp, Homo sapiens
gctacggaagggatatttaaagg

SEQ ID NO: 6100 - DNA, 23 bp, Homo sapiens
gatctcctagtggattgttttgg

SEQ ID NO: 6101 - DNA, 23 bp, Homo sapiens
ttgcccatcgttatgtttagtgg

SEQ ID NO: 6102 - DNA, 23 bp, Homo sapiens
tttttggtacgctttcaaactgg

SEQ ID NO: 6103 - DNA, 23 bp, Homo sapiens
attgattctcaactggaaaaagg

SEQ ID NO: 6104 - DNA, 23 bp, Homo sapiens
cgaagatgacggatgaaaaaagg

SEQ ID NO: 6105 - DNA, 23 bp, Homo sapiens
tcttatttcagtgaactaaaagg

SEQ ID NO: 6106 - DNA, 23 bp, Homo sapiens
agtttccccttgctgcttcatgg

SEQ ID NO: 6107 - DNA, 23 bp, Homo sapiens
cataaagttggaccactaaaagg

SEQ ID NO: 6108 - DNA, 23 bp, Homo sapiens
ggtggaggatgggaataattagg

SEQ ID NO: 6109 - DNA, 23 bp, Homo sapiens
aatcatatgtagtcattctatgg

SEQ ID NO: 6110 - DNA, 23 bp, Homo sapiens
atattttttccctttaactttgg

SEQ ID NO: 6111 - DNA, 23 bp, Homo sapiens
gcagaggttgtctaaccttttgg

SEQ ID NO: 6112 - DNA, 23 bp, Homo sapiens
gatagaggtgagaaaggttctgg

SEQ ID NO: 6113 - DNA, 23 bp, Homo sapiens
gaattattagacacaaaaattgg

SEQ ID NO: 6114 - DNA, 23 bp, Homo sapiens
gacctaccccctaagctttaggg

SEQ ID NO: 6115 - DNA, 23 bp, Homo sapiens
ggtttagctcgctagctaacagg

SEQ ID NO: 6116 - DNA, 23 bp, Homo sapiens
ctaattgttgttaaattgattgg

SEQ ID NO: 6117 - DNA, 23 bp, Homo sapiens
gtgcaaacagttatatttaatgg

SEQ ID NO: 6118 - DNA, 23 bp, Homo sapiens
ctaggggattaatattaataagg

SEQ ID NO: 6119 - DNA, 23 bp, Homo sapiens
aattagatgatgagacaaaatgg

SEQ ID NO: 6120 - DNA, 23 bp, Homo sapiens
gcttgactatcatcacattcagg

SEQ ID NO: 6121 - DNA, 23 bp, Homo sapiens
tgaagtacccgggcatttacagg

SEQ ID NO: 6122 - DNA, 23 bp, Homo sapiens
ttacaaaatacaattccttatgg

SEQ ID NO: 6123 - DNA, 23 bp, Homo sapiens
ttccatttaatgcttactaatgg

SEQ ID NO: 6124 - DNA, 23 bp, Homo sapiens
accttactatatacatataatgg

SEQ ID NO: 6125 - DNA, 23 bp, Homo sapiens
ccttccagaaatcactaaaatgg

SEQ ID NO: 6126 - DNA, 23 bp, Homo sapiens
ggttttacatagatctaaaatgg

SEQ ID NO: 6127 - DNA, 23 bp, Homo sapiens
tctatagcaaatgaaaaaaaagg

SEQ ID NO: 6128 - DNA, 23 bp, Homo sapiens
tgttggagctttcagcctattgg

SEQ ID NO: 6129 - DNA, 23 bp, Homo sapiens
ttaagcctgtttaccattgcagg

SEQ ID NO: 6130 - DNA, 23 bp, Homo sapiens
attctcatataacatgttttcgg

SEQ ID NO: 6131 - DNA, 23 bp, Homo sapiens
aaaacttgtcactatcaaaatgg

SEQ ID NO: 6132 - DNA, 23 bp, Homo sapiens
atatctattgaagatataattgg

SEQ ID NO: 6133 - DNA, 23 bp, Homo sapiens
tgaaaagtaggccagaaatttgg

SEQ ID NO: 6134 - DNA, 23 bp, Homo sapiens
gtgaccactcgaacatttacagg

SEQ ID NO: 6135 - DNA, 23 bp, Homo sapiens
aataaattcatctaataaaaagg

SEQ ID NO: 6136 - DNA, 23 bp, Homo sapiens
ttgtatataaaaagttaaatagg

SEQ ID NO: 6137 - DNA, 23 bp, Homo sapiens
ctacaatgtgactttctaaatgg

SEQ ID NO: 6138 - DNA, 23 bp, Homo sapiens
ctcattctcctactactctttgg

SEQ ID NO: 6139 - DNA, 23 bp, Homo sapiens
tccatactatacacataatatgg

SEQ ID NO: 6140 - DNA, 23 bp, Homo sapiens
gtttttggttaattgataaatgg

SEQ ID NO: 6141 - DNA, 23 bp, Homo sapiens
tgtgcattcgaactttaaatagg

SEQ ID NO: 6142 - DNA, 23 bp, Homo sapiens
gcagtagttgacattaaaaatgg

SEQ ID NO: 6143 - DNA, 23 bp, Homo sapiens
cagaatagttgggaactaaatgg

SEQ ID NO: 6144 - DNA, 23 bp, Homo sapiens
acttaaagttacatcaaaaatgg

SEQ ID NO: 6145 - DNA, 23 bp, Homo sapiens
tgaatatgactaatagaaattgg

SEQ ID NO: 6146 - DNA, 23 bp, Homo sapiens
ggaagaatttgacagaaatatgg

SEQ ID NO: 6147 - DNA, 23 bp, Homo sapiens
tgatttccttgggttccttttgg

SEQ ID NO: 6148 - DNA, 23 bp, Homo sapiens
gtttttttccctgaaattttcgg

SEQ ID NO: 6149 - DNA, 23 bp, Homo sapiens
ctaataaactaaagtcaaattgg

SEQ ID NO: 6150 - DNA, 23 bp, Homo sapiens
cttagagctctttcaattatggg

SEQ ID NO: 6151 - DNA, 23 bp, Homo sapiens
atttagatctaatttgtataggg

SEQ ID NO: 6152 - DNA, 23 bp, Homo sapiens
ctagcaactatcatgctaattgg

SEQ ID NO: 6153 - DNA, 23 bp, Homo sapiens
tataattgccatcaaataaaagg

SEQ ID NO: 6154 - DNA, 23 bp, Homo sapiens
tttaggggtcagcttttaaaagg

SEQ ID NO: 6155 - DNA, 23 bp, Homo sapiens
ctaaaaggcatttttaaatatgg

SEQ ID NO: 6156 - DNA, 23 bp, Homo sapiens
tgaaccttaaatttaaataatgg

SEQ ID NO: 6157 - DNA, 23 bp, Homo sapiens
aagttgtgaaattttcaaaatgg

SEQ ID NO: 6158 - DNA, 23 bp, Homo sapiens
gcttttatgtgtttacttagagg

SEQ ID NO: 6159 - DNA, 23 bp, Homo sapiens
tctgaaagttagccctttagagg

SEQ ID NO: 6160 - DNA, 23 bp, Homo sapiens
gcgttttctactcttaataaagg

SEQ ID NO: 6161 - DNA, 23 bp, Homo sapiens
ctgtattccatcagaaaaaatgg

SEQ ID NO: 6162 - DNA, 23 bp, Homo sapiens
ctatttgctcaacattattcagg

SEQ ID NO: 6163 - DNA, 23 bp, Homo sapiens
ttatttttctgtcagtaaaatgg

SEQ ID NO: 6164 - DNA, 23 bp, Homo sapiens
agacacttgaatatgaaaattgg

SEQ ID NO: 6165 - DNA, 23 bp, Homo sapiens
cataccttcctttacgttatggg

SEQ ID NO: 6166 - DNA, 23 bp, Homo sapiens
tttctggaatgactgatcttagg

SEQ ID NO: 6167 - DNA, 23 bp, Homo sapiens
gcttgcacagaatttttaattgg

SEQ ID NO: 6168 - DNA, 23 bp, Homo sapiens
ggtgattgcattgatattaaagg

SEQ ID NO: 6169 - DNA, 23 bp, Homo sapiens
attcctttccttttatttgatgg

SEQ ID NO: 6170 - DNA, 23 bp, Homo sapiens
ggactgttgtcataagttatagg

SEQ ID NO: 6171 - DNA, 23 bp, Homo sapiens
atttttgtcccaacaataatagg

SEQ ID NO: 6172 - DNA, 23 bp, Homo sapiens
tcagaatgttcaattttataggg

SEQ ID NO: 6173 - DNA, 23 bp, Homo sapiens
cttgaaaaggaagccattaaagg

SEQ ID NO: 6174 - DNA, 23 bp, Homo sapiens
gcataacgtttacatcaatatgg

SEQ ID NO: 6175 - DNA, 23 bp, Homo sapiens
tctccttcattgtaaatttaggg

SEQ ID NO: 6176 - DNA, 23 bp, Homo sapiens
accactaaagaaaatcttttcgg

SEQ ID NO: 6177 - DNA, 23 bp, Homo sapiens
gatagggcttatttttaaaatgg

SEQ ID NO: 6178 - DNA, 23 bp, Homo sapiens
tcataacacccatttaaaattgg

SEQ ID NO: 6179 - DNA, 23 bp, Homo sapiens
attatggcacaaaaactatttgg

SEQ ID NO: 6180 - DNA, 23 bp, Homo sapiens
tatttttgcatgcaaataattgg

SEQ ID NO: 6181 - DNA, 23 bp, Homo sapiens
gttcaatataactcattaaatgg

SEQ ID NO: 6182 - DNA, 23 bp, Homo sapiens
cttatgctggtcagattaaatgg

SEQ ID NO: 6183 - DNA, 23 bp, Homo sapiens
ttaccttgaaaactagtattagg

SEQ ID NO: 6184 - DNA, 23 bp, Homo sapiens
ttttaatctccattataaattgg

SEQ ID NO: 6185 - DNA, 23 bp, Homo sapiens
ctattcaactataaagtaaatgg

SEQ ID NO: 6186 - DNA, 23 bp, Homo sapiens
atatctaacctggaataatttgg

SEQ ID NO: 6187 - DNA, 23 bp, Homo sapiens
ccaaaagtaaacttaaaattagg

SEQ ID NO: 6188 - DNA, 23 bp, Homo sapiens
gttagaggatgcaaatattttgg

SEQ ID NO: 6189 - DNA, 23 bp, Homo sapiens
ctttctcattcctacttaatagg

SEQ ID NO: 6190 - DNA, 23 bp, Homo sapiens
ataaaatcagtttttattaaagg

SEQ ID NO: 6191 - DNA, 23 bp, Homo sapiens
gatccttccttagctgttaatgg

SEQ ID NO: 6192 - DNA, 23 bp, Homo sapiens
gtaatcagacaaccttaatttgg

SEQ ID NO: 6193 - DNA, 23 bp, Homo sapiens
ataacatgttgtgtaattattgg

SEQ ID NO: 6194 - DNA, 23 bp, Homo sapiens
gatattggccctttctaaaaagg

SEQ ID NO: 6195 - DNA, 23 bp, Homo sapiens
tgaaacatcgaatacaattttgg

SEQ ID NO: 6196 - DNA, 23 bp, Homo sapiens
tataggtttcaacaattaattgg

SEQ ID NO: 6197 - DNA, 23 bp, Homo sapiens
tctttttgtggtaagaaatatgg

SEQ ID NO: 6198 - DNA, 23 bp, Homo sapiens
ccttagacctagattcttaaagg

SEQ ID NO: 6199 - DNA, 23 bp, Homo sapiens
aatcattacctccaacttaatgg

SEQ ID NO: 6200 - DNA, 23 bp, Homo sapiens
atatgtgcttttgagataattgg

SEQ ID NO: 6201 - DNA, 23 bp, Homo sapiens
tcatactgtcctaagaaaaatgg

SEQ ID NO: 6202 - DNA, 23 bp, Homo sapiens
atagcaaccaaaattctttctgg

SEQ ID NO: 6203 - DNA, 23 bp, Homo sapiens
tgccaaatgaaaatcatacgagg

SEQ ID NO: 6204 - DNA, 23 bp, Homo sapiens
tcagtcagggaaatgaccagagg

SEQ ID NO: 6205 - DNA, 23 bp, Homo sapiens
gatcaaggtcttacactgggggg

SEQ ID NO: 6206 - DNA, 23 bp, Homo sapiens
ttagcgttaagtgttacaggagg

SEQ ID NO: 6207 - DNA, 23 bp, Homo sapiens
agggcaaagataagagacgaagg

SEQ ID NO: 6208 - DNA, 23 bp, Homo sapiens
aatcaccaaacatttacacatgg

SEQ ID NO: 6209 - DNA, 23 bp, Homo sapiens
gtaaacgaacagagcctgtgagg

SEQ ID NO: 6210 - DNA, 23 bp, Homo sapiens
ttatttatgactatagactgggg

SEQ ID NO: 6211 - DNA, 23 bp, Homo sapiens
ggaactacttgagaaagaccagg

SEQ ID NO: 6212 - DNA, 23 bp, Homo sapiens
tatcttctactcctaatgggagg

SEQ ID NO: 6213 - DNA, 23 bp, Homo sapiens
tagatggattgactcagtcaggg

SEQ ID NO: 6214 - DNA, 23 bp, Homo sapiens
tgacatctagtagaatgactagg

SEQ ID NO: 6215 - DNA, 23 bp, Homo sapiens
agacaacagcctcctaacagagg

SEQ ID NO: 6216 - DNA, 23 bp, Homo sapiens
gccagtataaggtaagctagtgg

SEQ ID NO: 6217 - DNA, 23 bp, Homo sapiens
tctgtgattaggacaaacaatgg

SEQ ID NO: 6218 - DNA, 23 bp, Homo sapiens
tcatgcagtaatccccaactggg

SEQ ID NO: 6219 - DNA, 23 bp, Homo sapiens
cccctattagagtctccttgggg

SEQ ID NO: 6220 - DNA, 23 bp, Homo sapiens
ttaggtgagaactttgcaagtgg

SEQ ID NO: 6221 - DNA, 23 bp, Homo sapiens
gtaccttccttttaaccctgggg

SEQ ID NO: 6222 - DNA, 23 bp, Homo sapiens
ccccaaggagactctaatagggg

SEQ ID NO: 6223 - DNA, 23 bp, Homo sapiens
gacaacagcctcctaacagaggg

SEQ ID NO: 6224 - DNA, 23 bp, Homo sapiens
tatttatgactatagactggggg

SEQ ID NO: 6225 - DNA, 23 bp, Homo sapiens
aatatataccgagaaaagagtgg

SEQ ID NO: 6226 - DNA, 23 bp, Homo sapiens
aataataactttagtcaaggggg

SEQ ID NO: 6227 - DNA, 23 bp, Homo sapiens
aaggcaaaatcctcagaccaggg

SEQ ID NO: 6228 - DNA, 23 bp, Homo sapiens
tataaggtaagctagtggtaggg

SEQ ID NO: 6229 - DNA, 23 bp, Homo sapiens
atttttactttttctgcaggcgg

SEQ ID NO: 6230 - DNA, 23 bp, Homo sapiens
ttcttggaggaaaatctaagagg

SEQ ID NO: 6231 - DNA, 23 bp, Homo sapiens
gctaaaaacgtaccaggccaagg

SEQ ID NO: 6232 - DNA, 23 bp, Homo sapiens
tgttgatcaaggtcttacactgg

SEQ ID NO: 6233 - DNA, 23 bp, Homo sapiens
gcagtttctgatcctgaagtggg

SEQ ID NO: 6234 - DNA, 23 bp, Homo sapiens
aggtttctggcagacagttgggg

SEQ ID NO: 6235 - DNA, 23 bp, Homo sapiens
catccccagggttaaaaggaagg

SEQ ID NO: 6236 - DNA, 23 bp, Homo sapiens
tgggagggaaaaattagcaaagg

SEQ ID NO: 6237 - DNA, 23 bp, Homo sapiens
aaaataagaaatactccccaagg

SEQ ID NO: 6238 - DNA, 23 bp, Homo sapiens
ttaatgttttgtgaaatcaaagg

SEQ ID NO: 6239 - DNA, 23 bp, Homo sapiens
atcaaggtcttacactggggggg

SEQ ID NO: 6240 - DNA, 23 bp, Homo sapiens
aagacgattatttcagtcagggg

SEQ ID NO: 6241 - DNA, 23 bp, Homo sapiens
acgaacatttggaagacactggg

SEQ ID NO: 6242 - DNA, 23 bp, Homo sapiens
gcaaatgataaggagttctaggg

SEQ ID NO: 6243 - DNA, 23 bp, Homo sapiens
ggccttctgtggaatttgggagg

SEQ ID NO: 6244 - DNA, 23 bp, Homo sapiens
gtttatgctaaaaacgtaccagg

SEQ ID NO: 6245 - DNA, 23 bp, Homo sapiens
tgtcctggccctctgttaggagg

SEQ ID NO: 6246 - DNA, 23 bp, Homo sapiens
tcaaggtcttacactgggggggg

SEQ ID NO: 6247 - DNA, 23 bp, Homo sapiens
tgataaggagttctagggtgagg

SEQ ID NO: 6248 - DNA, 23 bp, Homo sapiens
aagtgttgccattcttagagtgg

SEQ ID NO: 6249 - DNA, 23 bp, Homo sapiens
actttgcaagtggtttgcattgg

SEQ ID NO: 6250 - DNA, 23 bp, Homo sapiens
aatggtgagtgagtggagaaggg

SEQ ID NO: 6251 - DNA, 23 bp, Homo sapiens
ttatagctgaactgtttgctggg

SEQ ID NO: 6252 - DNA, 23 bp, Homo sapiens
gtataaggtaagctagtggtagg

SEQ ID NO: 6253 - DNA, 23 bp, Homo sapiens
atactttccagcaaagctcctgg

SEQ ID NO: 6254 - DNA, 23 bp, Homo sapiens
tctgtattcggtaacaaagtagg

SEQ ID NO: 6255 - DNA, 23 bp, Homo sapiens
agttaccttggagagtaagatgg

SEQ ID NO: 6256 - DNA, 23 bp, Homo sapiens
gtggctttggtctaactactagg

SEQ ID NO: 6257 - DNA, 23 bp, Homo sapiens
atgtgagattaatactaaaacgg

SEQ ID NO: 6258 - DNA, 23 bp, Homo sapiens
ctatatatacacaagaagattgg

SEQ ID NO: 6259 - DNA, 23 bp, Homo sapiens
ttcattctatagcccagttgggg

SEQ ID NO: 6260 - DNA, 23 bp, Homo sapiens
tattggctcaggacatccccagg

SEQ ID NO: 6261 - DNA, 23 bp, Homo sapiens
ccacatgtataaactcatacagg

SEQ ID NO: 6262 - DNA, 23 bp, Homo sapiens
gctctaaacctcaatcactttgg

SEQ ID NO: 6263 - DNA, 23 bp, Homo sapiens
catcattctgacattcttggagg

SEQ ID NO: 6264 - DNA, 23 bp, Homo sapiens
ggagctttgctggaaagtatagg

SEQ ID NO: 6265 - DNA, 23 bp, Homo sapiens
cataattgaaaggaaatatgtgg

SEQ ID NO: 6266 - DNA, 23 bp, Homo sapiens
aatgtttgaatatgatacaaagg

SEQ ID NO: 6267 - DNA, 23 bp, Homo sapiens
cgttaagtgttacaggaggcagg

SEQ ID NO: 6268 - DNA, 23 bp, Homo sapiens
aggacttcagaatttaattgagg

SEQ ID NO: 6269 - DNA, 23 bp, Homo sapiens
ttagggaaccaaagtgattgagg

SEQ ID NO: 6270 - DNA, 23 bp, Homo sapiens
ccttatactggccaatctcatgg

SEQ ID NO: 6271 - DNA, 23 bp, Homo sapiens
cttcagaatttaattgaggaggg

SEQ ID NO: 6272 - DNA, 23 bp, Homo sapiens
gaagtgatcacgcagatacctgg

SEQ ID NO: 6273 - DNA, 23 bp, Homo sapiens
gggctgacagatctgtgattagg

SEQ ID NO: 6274 - DNA, 23 bp, Homo sapiens
gaaataataactttagtcaaggg

SEQ ID NO: 6275 - DNA, 23 bp, Homo sapiens
tcccactttccaccaaaaagagg

SEQ ID NO: 6276 - DNA, 23 bp, Homo sapiens
agtaccttccttttaaccctggg

SEQ ID NO: 6277 - DNA, 23 bp, Homo sapiens
tctcctgtgttgcaatcctctgg

SEQ ID NO: 6278 - DNA, 23 bp, Homo sapiens
tttcatttctagtagattgtcgg

SEQ ID NO: 6279 - DNA, 23 bp, Homo sapiens
gctaataagggcttgtagtaagg

SEQ ID NO: 6280 - DNA, 23 bp, Homo sapiens
gtagtgccctggacaaggtctgg

SEQ ID NO: 6281 - DNA, 23 bp, Homo sapiens
ctctgggcaatagctaataaggg

SEQ ID NO: 6282 - DNA, 23 bp, Homo sapiens
tagtatacatgcctcccattagg

SEQ ID NO: 6283 - DNA, 23 bp, Homo sapiens
ggatcgggagcatttgttagagg

SEQ ID NO: 6284 - DNA, 23 bp, Homo sapiens
tgtaaattgttcacagtcatagg

SEQ ID NO: 6285 - DNA, 23 bp, Homo sapiens
atgatttagcagaatttgatagg

SEQ ID NO: 6286 - DNA, 23 bp, Homo sapiens
gatatatcttctactcctaatgg

SEQ ID NO: 6287 - DNA, 23 bp, Homo sapiens
tttacatgatgacctcaaattgg

SEQ ID NO: 6288 - DNA, 23 bp, Homo sapiens
ctccccaaggagactctaatagg

SEQ ID NO: 6289 - DNA, 23 bp, Homo sapiens
aggacatccccagggttaaaagg

SEQ ID NO: 6290 - DNA, 23 bp, Homo sapiens
gctgttgtctcttcacttccagg

SEQ ID NO: 6291 - DNA, 23 bp, Homo sapiens
tttgatttcacaaaacattaagg

SEQ ID NO: 6292 - DNA, 23 bp, Homo sapiens
ttgacagtatacaagtttaatgg

SEQ ID NO: 6293 - DNA, 23 bp, Homo sapiens
cttaatagtgaaattataaatgg

SEQ ID NO: 6294 - DNA, 23 bp, Homo sapiens
aagttatatctcattcacagggg

SEQ ID NO: 6295 - DNA, 23 bp, Homo sapiens
aaagcattcagatcactaggggg

SEQ ID NO: 6296 - DNA, 23 bp, Homo sapiens
atttgatagagatttaactgtgg

SEQ ID NO: 6297 - DNA, 23 bp, Homo sapiens
ttggaaatccaggtccacagtgg

SEQ ID NO: 6298 - DNA, 23 bp, Homo sapiens
acaggggaagagtcaccaagtgg

SEQ ID NO: 6299 - DNA, 23 bp, Homo sapiens
cctccaatgccatgacacagggg

SEQ ID NO: 6300 - DNA, 23 bp, Homo sapiens
gcttcatattgcctaccatgtgg

SEQ ID NO: 6301 - DNA, 23 bp, Homo sapiens
tgaggaacagggttaaactgagg

SEQ ID NO: 6302 - DNA, 23 bp, Homo sapiens
tgtagcagtgaagaaaagagcgg

SEQ ID NO: 6303 - DNA, 23 bp, Homo sapiens
cataggacaagaacttaaggggg

SEQ ID NO: 6304 - DNA, 23 bp, Homo sapiens
atgaagactctagaggagggagg

SEQ ID NO: 6305 - DNA, 23 bp, Homo sapiens
atcaattgtctatcacaaggtgg

SEQ ID NO: 6306 - DNA, 23 bp, Homo sapiens
ttacaaacaaaagtgggacaggg

SEQ ID NO: 6307 - DNA, 23 bp, Homo sapiens
tatgtcaaagcaaaccatggagg

SEQ ID NO: 6308 - DNA, 23 bp, Homo sapiens
atatgtcataaacttgacagtgg

SEQ ID NO: 6309 - DNA, 23 bp, Homo sapiens
tgtcagagattacagccacatgg

SEQ ID NO: 6310 - DNA, 23 bp, Homo sapiens
tgtatagtgaatgtatcacttgg

SEQ ID NO: 6311 - DNA, 23 bp, Homo sapiens
tctgagctagagctttaatgggg

SEQ ID NO: 6312 - DNA, 23 bp, Homo sapiens
agagggacaggctaaaatggagg

SEQ ID NO: 6313 - DNA, 23 bp, Homo sapiens
atgtcttcttcaaactaccaagg

SEQ ID NO: 6314 - DNA, 23 bp, Homo sapiens
ctctacagatataagctgagtgg

SEQ ID NO: 6315 - DNA, 23 bp, Homo sapiens
cagaccagaccgtcaatgtgagg

SEQ ID NO: 6316 - DNA, 23 bp, Homo sapiens
gtgtctcacggaagcccaagggg

SEQ ID NO: 6317 - DNA, 23 bp, Homo sapiens
tggccattccataggctcagggg

SEQ ID NO: 6318 - DNA, 23 bp, Homo sapiens
attaaatagtagggtcactgtgg

SEQ ID NO: 6319 - DNA, 23 bp, Homo sapiens
cagagctcagtagatccacatgg

SEQ ID NO: 6320 - DNA, 23 bp, Homo sapiens
agtgacaagtcttatgacagtgg

SEQ ID NO: 6321 - DNA, 23 bp, Homo sapiens
ttatgaatgtgatccagacaagg

SEQ ID NO: 6322 - DNA, 23 bp, Homo sapiens
aaatcataagagggaagacgagg

SEQ ID NO: 6323 - DNA, 23 bp, Homo sapiens
aaagttatatctcattcacaggg

SEQ ID NO: 6324 - DNA, 23 bp, Homo sapiens
actctacctcctaaatgactggg

SEQ ID NO: 6325 - DNA, 23 bp, Homo sapiens
ataagctgagcaacatttggggg

SEQ ID NO: 6326 - DNA, 23 bp, Homo sapiens
tgaagtaaaatctgaaaacaggg

SEQ ID NO: 6327 - DNA, 23 bp, Homo sapiens
tgaatgtgatccagacaaggagg

SEQ ID NO: 6328 - DNA, 23 bp, Homo sapiens
acaacactgatacacacagtagg

SEQ ID NO: 6329 - DNA, 23 bp, Homo sapiens
gataaccatgaagactctagagg

SEQ ID NO: 6330 - DNA, 23 bp, Homo sapiens
ttgtctccagaagaataggaagg

SEQ ID NO: 6331 - DNA, 23 bp, Homo sapiens
tctcccctgagcctatggaatgg

SEQ ID NO: 6332 - DNA, 23 bp, Homo sapiens
agatttctatatatggcccgtgg

SEQ ID NO: 6333 - DNA, 23 bp, Homo sapiens
tggcactccttggagctaggtgg

SEQ ID NO: 6334 - DNA, 23 bp, Homo sapiens
gtgtaaaagcacatgctgcaggg

SEQ ID NO: 6335 - DNA, 23 bp, Homo sapiens
tcaagtctgaactctcaacaagg

SEQ ID NO: 6336 - DNA, 23 bp, Homo sapiens
agacacgctgagagtcacttcgg

SEQ ID NO: 6337 - DNA, 23 bp, Homo sapiens
aaagcaagaggtatactaagggg

SEQ ID NO: 6338 - DNA, 23 bp, Homo sapiens
gtaacttcaaatctacaatgtgg

SEQ ID NO: 6339 - DNA, 23 bp, Homo sapiens
gaatgtgatccagacaaggaggg

SEQ ID NO: 6340 - DNA, 23 bp, Homo sapiens
gatatttccaaagagtccatcgg

SEQ ID NO: 6341 - DNA, 23 bp, Homo sapiens
aagcaagaggtatactaaggggg

SEQ ID NO: 6342 - DNA, 23 bp, Homo sapiens
atagtgttgaaatataccctagg

SEQ ID NO: 6343 - DNA, 23 bp, Homo sapiens
gatatatacaacctaaacggtgg

SEQ ID NO: 6344 - DNA, 23 bp, Homo sapiens
tgtgtggacaaacttatcactgg

SEQ ID NO: 6345 - DNA, 23 bp, Homo sapiens
aggtaggcaactgtgtctcacgg

SEQ ID NO: 6346 - DNA, 23 bp, Homo sapiens
taagcaaggaaatcataagaggg

SEQ ID NO: 6347 - DNA, 23 bp, Homo sapiens
ggaacctttaccttagcctgtgg

SEQ ID NO: 6348 - DNA, 23 bp, Homo sapiens
aaacctatgaaaagaaaccctgg

SEQ ID NO: 6349 - DNA, 23 bp, Homo sapiens
gggctcctctagccccaaagggg

SEQ ID NO: 6350 - DNA, 23 bp, Homo sapiens
gtatgcataagatattggccagg

SEQ ID NO: 6351 - DNA, 23 bp, Homo sapiens
gtgcagtgataactttattgcgg

SEQ ID NO: 6352 - DNA, 23 bp, Homo sapiens
tgaaatacggagataaggaaggg

SEQ ID NO: 6353 - DNA, 23 bp, Homo sapiens
gaatgaagaaaagtatcaggtgg

SEQ ID NO: 6354 - DNA, 23 bp, Homo sapiens
gccctatgaaagacaccatgtgg

SEQ ID NO: 6355 - DNA, 23 bp, Homo sapiens
gttgctcagcttatctggcaggg

SEQ ID NO: 6356 - DNA, 23 bp, Homo sapiens
aggtaaagcaaatcccagctagg

SEQ ID NO: 6357 - DNA, 23 bp, Homo sapiens
gtataaaactacatttgtgaagg

SEQ ID NO: 6358 - DNA, 23 bp, Homo sapiens
agtacttccacctagctccaagg

SEQ ID NO: 6359 - DNA, 23 bp, Homo sapiens
aatcaacctgttaaagaaagggg

SEQ ID NO: 6360 - DNA, 23 bp, Homo sapiens
aatacatcttggggagcgggggg

SEQ ID NO: 6361 - DNA, 23 bp, Homo sapiens
tcttaaaataaccataagcaggg

SEQ ID NO: 6362 - DNA, 23 bp, Homo sapiens
aaataagacgtcagaatgagggg

SEQ ID NO: 6363 - DNA, 23 bp, Homo sapiens
tgtgacaagcactctatggttgg

SEQ ID NO: 6364 - DNA, 23 bp, Homo sapiens
tgggagactatgctactaagtgg

SEQ ID NO: 6365 - DNA, 23 bp, Homo sapiens
cagtcacagctaaaccaagtagg

SEQ ID NO: 6366 - DNA, 23 bp, Homo sapiens
atatatacaacctaaacggtggg

SEQ ID NO: 6367 - DNA, 23 bp, Homo sapiens
acaggttaaacgccaggacaggg

SEQ ID NO: 6368 - DNA, 23 bp, Homo sapiens
agggacagaattgtattcagtgg

SEQ ID NO: 6369 - DNA, 23 bp, Homo sapiens
attgtttctaggaaggcaggtgg

SEQ ID NO: 6370 - DNA, 23 bp, Homo sapiens
aaacatactcactcatactgcgg

SEQ ID NO: 6371 - DNA, 23 bp, Homo sapiens
tcatagcccagtcatttaggagg

SEQ ID NO: 6372 - DNA, 23 bp, Homo sapiens
aaaccaagtaggcaggtcagagg

SEQ ID NO: 6373 - DNA, 23 bp, Homo sapiens
ttctgcatgagaatgtcttgagg

SEQ ID NO: 6374 - DNA, 23 bp, Homo sapiens
tggaggatagaaaacctccatgg

SEQ ID NO: 6375 - DNA, 23 bp, Homo sapiens
tgaactttttgacactggggggg

SEQ ID NO: 6376 - DNA, 23 bp, Homo sapiens
cttgaataaaatattgacgatgg

SEQ ID NO: 6377 - DNA, 23 bp, Homo sapiens
tgtgtctcacggaagcccaaggg

SEQ ID NO: 6378 - DNA, 23 bp, Homo sapiens
actagtctggcgatagaagaggg

SEQ ID NO: 6379 - DNA, 23 bp, Homo sapiens
tattcttaacattctatgcgtgg

SEQ ID NO: 6380 - DNA, 23 bp, Homo sapiens
cattatgtcaaagcaaaccatgg

SEQ ID NO: 6381 - DNA, 23 bp, Homo sapiens
gttaggtctctaataaacaatgg

SEQ ID NO: 6382 - DNA, 23 bp, Homo sapiens
agagaagttactgtatggcaggg

SEQ ID NO: 6383 - DNA, 23 bp, Homo sapiens
ttgagagtacaaataactgtagg

SEQ ID NO: 6384 - DNA, 23 bp, Homo sapiens
aaacccatgagaaatggctcagg

SEQ ID NO: 6385 - DNA, 23 bp, Homo sapiens
acaaagtcctgcagtcaactcgg

SEQ ID NO: 6386 - DNA, 23 bp, Homo sapiens
ccatgttcctgaaggaaagtggg

SEQ ID NO: 6387 - DNA, 23 bp, Homo sapiens
tggttggaaattaaatagtaggg

SEQ ID NO: 6388 - DNA, 23 bp, Homo sapiens
gcataggacaagaacttaagggg

SEQ ID NO: 6389 - DNA, 23 bp, Homo sapiens
gattcctcatatggcagtagagg

SEQ ID NO: 6390 - DNA, 23 bp, Homo sapiens
atgcctttaaaatagacagcagg

SEQ ID NO: 6391 - DNA, 23 bp, Homo sapiens
cactcctcaaatgtttaaggtgg

SEQ ID NO: 6392 - DNA, 23 bp, Homo sapiens
agaaagcattcagatcactaggg

SEQ ID NO: 6393 - DNA, 23 bp, Homo sapiens
ttaaaacctccgaaactccacgg

SEQ ID NO: 6394 - DNA, 23 bp, Homo sapiens
tgtcttttcccttccctctgtgg

SEQ ID NO: 6395 - DNA, 23 bp, Homo sapiens
atcaatagataaattcatagtgg

SEQ ID NO: 6396 - DNA, 23 bp, Homo sapiens
taacattcattctaaaacagagg

SEQ ID NO: 6397 - DNA, 23 bp, Homo sapiens
actgattatgtctagccttgtgg

SEQ ID NO: 6398 - DNA, 23 bp, Homo sapiens
ataatggcttaaatttgagaagg

SEQ ID NO: 6399 - DNA, 23 bp, Homo sapiens
ttaaacgccaggacagggaaagg

SEQ ID NO: 6400 - DNA, 23 bp, Homo sapiens
ggggtgagaagaagaaagcatgg

SEQ ID NO: 6401 - DNA, 23 bp, Homo sapiens
aagtgcctggtgaaatgtattgg

SEQ ID NO: 6402 - DNA, 23 bp, Homo sapiens
gtcttatgacagtggataagggg

SEQ ID NO: 6403 - DNA, 23 bp, Homo sapiens
tatggcccgtggagtttcggagg

SEQ ID NO: 6404 - DNA, 23 bp, Homo sapiens
atagtggcttttccttatggagg

SEQ ID NO: 6405 - DNA, 23 bp, Homo sapiens
ctgtaatctctgacacacaaagg

SEQ ID NO: 6406 - DNA, 23 bp, Homo sapiens
cctattatgttcacatatggagg

SEQ ID NO: 6407 - DNA, 23 bp, Homo sapiens
ggttttgtcctctaacgcatagg

SEQ ID NO: 6408 - DNA, 23 bp, Homo sapiens
taaaacctccgaaactccacggg

SEQ ID NO: 6409 - DNA, 23 bp, Homo sapiens
gacttgagcttaaaaagttgggg

SEQ ID NO: 6410 - DNA, 23 bp, Homo sapiens
ttagaacttagttatatccaagg

SEQ ID NO: 6411 - DNA, 23 bp, Homo sapiens
agtgaagtaggagtggaaaacgg

SEQ ID NO: 6412 - DNA, 23 bp, Homo sapiens
agtttatctttgaaagagagagg

SEQ ID NO: 6413 - DNA, 23 bp, Homo sapiens
gtattttacactgcatatgaggg

SEQ ID NO: 6414 - DNA, 23 bp, Homo sapiens
ggtatttgtcatgcctgaaaggg

SEQ ID NO: 6415 - DNA, 23 bp, Homo sapiens
ctaatctcctctgaaccacttgg

SEQ ID NO: 6416 - DNA, 23 bp, Homo sapiens
ctagacagagataagagagctgg

SEQ ID NO: 6417 - DNA, 23 bp, Homo sapiens
taatacatcttggggagcggggg

SEQ ID NO: 6418 - DNA, 23 bp, Homo sapiens
atataatcacattttgcaagtgg

SEQ ID NO: 6419 - DNA, 23 bp, Homo sapiens
cgtggtttctggctaatttgggg

SEQ ID NO: 6420 - DNA, 23 bp, Homo sapiens
aacatactcactcatactgcggg

SEQ ID NO: 6421 - DNA, 23 bp, Homo sapiens
cctgttgacaatcagcgaaacgg

SEQ ID NO: 6422 - DNA, 23 bp, Homo sapiens
gtatgcagtttaaaaatggaagg

SEQ ID NO: 6423 - DNA, 23 bp, Homo sapiens
ttttaaaattagctaagggaggg

SEQ ID NO: 6424 - DNA, 23 bp, Homo sapiens
tgtaatctctgacacacaaaggg

SEQ ID NO: 6425 - DNA, 23 bp, Homo sapiens
tgagtgatttttttaaaccaggg

SEQ ID NO: 6426 - DNA, 23 bp, Homo sapiens
ataaatcaaaatgctcaagcagg

SEQ ID NO: 6427 - DNA, 23 bp, Homo sapiens
ctgttattataacaattcacagg

SEQ ID NO: 6428 - DNA, 23 bp, Homo sapiens
agaggtatactaagggggatggg

SEQ ID NO: 6429 - DNA, 23 bp, Homo sapiens
tctcatgcagaaaccaaacttgg

SEQ ID NO: 6430 - DNA, 23 bp, Homo sapiens
tcagccacaggctaaggtaaagg

SEQ ID NO: 6431 - DNA, 23 bp, Homo sapiens
tccatgttcctgaaggaaagtgg

SEQ ID NO: 6432 - DNA, 23 bp, Homo sapiens
cagcctgagccatttctcatggg

SEQ ID NO: 6433 - DNA, 23 bp, Homo sapiens
gcaaatgcatgctgccacagagg

SEQ ID NO: 6434 - DNA, 23 bp, Homo sapiens
tattttacaggcctattgtgtgg

SEQ ID NO: 6435 - DNA, 23 bp, Homo sapiens
gcatgctgccacagagggaaggg

SEQ ID NO: 6436 - DNA, 23 bp, Homo sapiens
ataatacatcttggggagcgggg

SEQ ID NO: 6437 - DNA, 23 bp, Homo sapiens
agagtcaccaagtggttcagagg

SEQ ID NO: 6438 - DNA, 23 bp, Homo sapiens
ttagggagctactaagtgcctgg

SEQ ID NO: 6439 - DNA, 23 bp, Homo sapiens
agacttgtcactgtgtaagcagg

SEQ ID NO: 6440 - DNA, 23 bp, Homo sapiens
agacagcgtttaataagtgttgg

SEQ ID NO: 6441 - DNA, 23 bp, Homo sapiens
tatattttctgtaagaaatgtgg

SEQ ID NO: 6442 - DNA, 23 bp, Homo sapiens
gcctccaatgccatgacacaggg

SEQ ID NO: 6443 - DNA, 23 bp, Homo sapiens
gaaagaagaatagcagactaggg

SEQ ID NO: 6444 - DNA, 23 bp, Homo sapiens
aacctcctaatgttttagtaggg

SEQ ID NO: 6445 - DNA, 23 bp, Homo sapiens
tagattactgcagattaaagagg

SEQ ID NO: 6446 - DNA, 23 bp, Homo sapiens
ccaatttgcattctttgtggtgg

SEQ ID NO: 6447 - DNA, 23 bp, Homo sapiens
tcaatacatgcatctctcaatgg

SEQ ID NO: 6448 - DNA, 23 bp, Homo sapiens
aatattcctttaaaaatcagagg

SEQ ID NO: 6449 - DNA, 23 bp, Homo sapiens
ttaaaattagctaagggaggggg

SEQ ID NO: 6450 - DNA, 23 bp, Homo sapiens
ataaaagagaagttactgtatgg

SEQ ID NO: 6451 - DNA, 23 bp, Homo sapiens
cttgcacatccaacttcataggg

SEQ ID NO: 6452 - DNA, 23 bp, Homo sapiens
ttccctactaaaacattaggagg

SEQ ID NO: 6453 - DNA, 23 bp, Homo sapiens
ggaagacgaggacacaagcttgg

SEQ ID NO: 6454 - DNA, 23 bp, Homo sapiens
cataggtttatagaattaggagg

SEQ ID NO: 6455 - DNA, 23 bp, Homo sapiens
agcccagtacctgaatatagtgg

SEQ ID NO: 6456 - DNA, 23 bp, Homo sapiens
ctaatttcccttaaagcaagagg

SEQ ID NO: 6457 - DNA, 23 bp, Homo sapiens
cttttactgtaaaccatcatggg

SEQ ID NO: 6458 - DNA, 23 bp, Homo sapiens
ttattcaaatgtaattttggagg

SEQ ID NO: 6459 - DNA, 23 bp, Homo sapiens
gtaaataagacgtcagaatgagg

SEQ ID NO: 6460 - DNA, 23 bp, Homo sapiens
tattgttcagccacaggctaagg

SEQ ID NO: 6461 - DNA, 23 bp, Homo sapiens
gcagtgttttgtgcaacaaacgg

SEQ ID NO: 6462 - DNA, 23 bp, Homo sapiens
aaacttttaaggatatttcaggg

SEQ ID NO: 6463 - DNA, 23 bp, Homo sapiens
atgtcatatgaatctcttcaggg

SEQ ID NO: 6464 - DNA, 23 bp, Homo sapiens
tgttgctcagcttatctggcagg

SEQ ID NO: 6465 - DNA, 23 bp, Homo sapiens
aggatgttaataagaaaggaagg

SEQ ID NO: 6466 - DNA, 23 bp, Homo sapiens
ttggagctaggtggaagtactgg

SEQ ID NO: 6467 - DNA, 23 bp, Homo sapiens
gagatatagaaaccaaaaacggg

SEQ ID NO: 6468 - DNA, 23 bp, Homo sapiens
attaatatataatcatttcaggg

SEQ ID NO: 6469 - DNA, 23 bp, Homo sapiens
gcatataatgttagataaagagg

SEQ ID NO: 6470 - DNA, 23 bp, Homo sapiens
gtgttgtgacaagcactctatgg

SEQ ID NO: 6471 - DNA, 23 bp, Homo sapiens
gtaagcaaggaaatcataagagg

SEQ ID NO: 6472 - DNA, 23 bp, Homo sapiens
ctgagctctggccattccatagg

SEQ ID NO: 6473 - DNA, 23 bp, Homo sapiens
ttaaagcaagaggtatactaagg

SEQ ID NO: 6474 - DNA, 23 bp, Homo sapiens
ttttatttacaagtttttgaagg

SEQ ID NO: 6475 - DNA, 23 bp, Homo sapiens
agacatagacctgacctgatagg

SEQ ID NO: 6476 - DNA, 23 bp, Homo sapiens
gttgccatggacctgactctggg

SEQ ID NO: 6477 - DNA, 23 bp, Homo sapiens
aagcatttgcggttttaacttgg

SEQ ID NO: 6478 - DNA, 23 bp, Homo sapiens
aaatcaacctgttaaagaaaggg

SEQ ID NO: 6479 - DNA, 23 bp, Homo sapiens
tcttcaatgcctcacattgacgg

SEQ ID NO: 6480 - DNA, 23 bp, Homo sapiens
ggctttttaaatactcaccttgg

SEQ ID NO: 6481 - DNA, 23 bp, Homo sapiens
gtaccgcattttctttatgcagg

SEQ ID NO: 6482 - DNA, 23 bp, Homo sapiens
tgagatatagaaaccaaaaacgg

SEQ ID NO: 6483 - DNA, 23 bp, Homo sapiens
aatttccttttaaaattcacagg

SEQ ID NO: 6484 - DNA, 23 bp, Homo sapiens
gaaaggggtaaaacatttgaagg

SEQ ID NO: 6485 - DNA, 23 bp, Homo sapiens
aataaatctccctatgaagttgg

SEQ ID NO: 6486 - DNA, 23 bp, Homo sapiens
ggagtggaaaacggtataatcgg

SEQ ID NO: 6487 - DNA, 23 bp, Homo sapiens
ttatgtctagccttgtggttggg

SEQ ID NO: 6488 - DNA, 23 bp, Homo sapiens
ttaattataatggcactccttgg

SEQ ID NO: 6489 - DNA, 23 bp, Homo sapiens
atttttacttggggtatgaatgg

SEQ ID NO: 6490 - DNA, 23 bp, Homo sapiens
atatgaaaacccatgagaaatgg

SEQ ID NO: 6491 - DNA, 23 bp, Homo sapiens
cataataattttcaatgcatggg

SEQ ID NO: 6492 - DNA, 23 bp, Homo sapiens
ctagggggtaattaactgattgg

SEQ ID NO: 6493 - DNA, 23 bp, Homo sapiens
actgggctcagacctgataaagg

SEQ ID NO: 6494 - DNA, 23 bp, Homo sapiens
ttataatttgtgtatgtggcagg

SEQ ID NO: 6495 - DNA, 23 bp, Homo sapiens
ttttttctaaagttgagcttggg

SEQ ID NO: 6496 - DNA, 23 bp, Homo sapiens
ccgtttcgctgattgtcaacagg

SEQ ID NO: 6497 - DNA, 23 bp, Homo sapiens
tgggctcctctagccccaaaggg

SEQ ID NO: 6498 - DNA, 23 bp, Homo sapiens
ctggttgtctccagaagaatagg

SEQ ID NO: 6499 - DNA, 23 bp, Homo sapiens
agtactttcttctcaataagtgg

SEQ ID NO: 6500 - DNA, 23 bp, Homo sapiens
ttaaaaagttggggctatatggg

SEQ ID NO: 6501 - DNA, 23 bp, Homo sapiens
cagtgactattttcaatgatggg

SEQ ID NO: 6502 - DNA, 23 bp, Homo sapiens
agtcactgaattagattgaatgg

SEQ ID NO: 6503 - DNA, 23 bp, Homo sapiens
ttttaggatgttaataagaaagg

SEQ ID NO: 6504 - DNA, 23 bp, Homo sapiens
ccacatacacaaattataaacgg

SEQ ID NO: 6505 - DNA, 23 bp, Homo sapiens
ggagacttagatcaagtaatagg

SEQ ID NO: 6506 - DNA, 23 bp, Homo sapiens
tgatcactctgatacattgcagg

SEQ ID NO: 6507 - DNA, 23 bp, Homo sapiens
aatccatgaagaaaaattgatgg

SEQ ID NO: 6508 - DNA, 23 bp, Homo sapiens
gcagtcagccttaattataatgg

SEQ ID NO: 6509 - DNA, 23 bp, Homo sapiens
gattgtggctaatataattcagg

SEQ ID NO: 6510 - DNA, 23 bp, Homo sapiens
tctccacaaaaagctttaagagg

SEQ ID NO: 6511 - DNA, 23 bp, Homo sapiens
atatatggcccgtggagtttcgg

SEQ ID NO: 6512 - DNA, 23 bp, Homo sapiens
cagggtgatgattatttaagagg

SEQ ID NO: 6513 - DNA, 23 bp, Homo sapiens
aagcccaaggggtaagaaaaagg

SEQ ID NO: 6514 - DNA, 23 bp, Homo sapiens
tgctttagtctaatttcaattgg

SEQ ID NO: 6515 - DNA, 23 bp, Homo sapiens
tccctcctctagagtcttcatgg

SEQ ID NO: 6516 - DNA, 23 bp, Homo sapiens
agataagctgagcaacatttggg

SEQ ID NO: 6517 - DNA, 23 bp, Homo sapiens
tctgttttagaatgaatgttagg

SEQ ID NO: 6518 - DNA, 23 bp, Homo sapiens
gaaactgtgcagcaattaattgg

SEQ ID NO: 6519 - DNA, 23 bp, Homo sapiens
tcttgcacatccaacttcatagg

SEQ ID NO: 6520 - DNA, 23 bp, Homo sapiens
cctccatatgtgaacataatagg

SEQ ID NO: 6521 - DNA, 23 bp, Homo sapiens
ataaagtgcaaatattttacagg

SEQ ID NO: 6522 - DNA, 23 bp, Homo sapiens
gttttacccctttctttaacagg

SEQ ID NO: 6523 - DNA, 23 bp, Homo sapiens
cttttatcccactttccttcagg

SEQ ID NO: 6524 - DNA, 23 bp, Homo sapiens
atgtacttccaccatctatttgg

SEQ ID NO: 6525 - DNA, 23 bp, Homo sapiens
gtcataagtataaacaaaaatgg

SEQ ID NO: 6526 - DNA, 23 bp, Homo sapiens
atatacctgtgaattttaaaagg

SEQ ID NO: 6527 - DNA, 23 bp, Homo sapiens
cacttcacacagattttaaaagg

SEQ ID NO: 6528 - DNA, 23 bp, Homo sapiens
ctagtgatctgaatgctttctgg

SEQ ID NO: 6529 - DNA, 23 bp, Homo sapiens
cttcgtcgtaaacttgttaaagg

SEQ ID NO: 6530 - DNA, 23 bp, Homo sapiens
ttaagtttctgaatacttaaagg

SEQ ID NO: 6531 - DNA, 23 bp, Homo sapiens
aagtagaagcaataacagcgagg

SEQ ID NO: 6532 - DNA, 23 bp, Homo sapiens
taagtgggagaatatctgcaagg

SEQ ID NO: 6533 - DNA, 23 bp, Homo sapiens
aagtaatgaaaatagaaccaagg

SEQ ID NO: 6534 - DNA, 23 bp, Homo sapiens
ctacttcacaacagtaagcgggg

SEQ ID NO: 6535 - DNA, 23 bp, Homo sapiens
tttagagacagtgagacctgagg

SEQ ID NO: 6536 - DNA, 23 bp, Homo sapiens
tttggaataaaaatatatggggg

SEQ ID NO: 6537 - DNA, 23 bp, Homo sapiens
ttatgtacagtgactgcaggagg

SEQ ID NO: 6538 - DNA, 23 bp, Homo sapiens
aagcagtttggggagagatgcgg

SEQ ID NO: 6539 - DNA, 23 bp, Homo sapiens
tagatctatcagataacgagcgg

SEQ ID NO: 6540 - DNA, 23 bp, Homo sapiens
ttggtaggcaggaatttacaggg

SEQ ID NO: 6541 - DNA, 23 bp, Homo sapiens
ataacaaatcttgctaacagtgg

SEQ ID NO: 6542 - DNA, 23 bp, Homo sapiens
gttcaatgagaagtcctccatgg

SEQ ID NO: 6543 - DNA, 23 bp, Homo sapiens
aaaacaacaggctataagagagg

SEQ ID NO: 6544 - DNA, 23 bp, Homo sapiens
tagtggatataagttcatgttgg

SEQ ID NO: 6545 - DNA, 23 bp, Homo sapiens
tgaaccttaaccttcccagaagg

SEQ ID NO: 6546 - DNA, 23 bp, Homo sapiens
ggtctcactgtctctaaaggagg

SEQ ID NO: 6547 - DNA, 23 bp, Homo sapiens
tgccactaagatggtaaccgtgg

SEQ ID NO: 6548 - DNA, 23 bp, Homo sapiens
ataaagaaaaaaaacaacaaagg

SEQ ID NO: 6549 - DNA, 23 bp, Homo sapiens
agcagatagtggcttaatggtgg

SEQ ID NO: 6550 - DNA, 23 bp, Homo sapiens
tgtcttgcacagaagtgacttgg

SEQ ID NO: 6551 - DNA, 23 bp, Homo sapiens
ctatgttattaatagtgccatgg

SEQ ID NO: 6552 - DNA, 23 bp, Homo sapiens
gagacagtgagacctgaggacgg

SEQ ID NO: 6553 - DNA, 23 bp, Homo sapiens
acaacagtaagcggggagagggg

SEQ ID NO: 6554 - DNA, 23 bp, Homo sapiens
tttaacgttatgcacatagaggg

SEQ ID NO: 6555 - DNA, 23 bp, Homo sapiens
gtatgttgcattagaaaaagggg

SEQ ID NO: 6556 - DNA, 23 bp, Homo sapiens
cagaggaatagaaatgaagaggg

SEQ ID NO: 6557 - DNA, 23 bp, Homo sapiens
acgtatatatatacaatgagtgg

SEQ ID NO: 6558 - DNA, 23 bp, Homo sapiens
tgcttaatagttttagaacaggg

SEQ ID NO: 6559 - DNA, 23 bp, Homo sapiens
gcagaggtcaaatagacagtcgg

SEQ ID NO: 6560 - DNA, 23 bp, Homo sapiens
agacagtgagacctgaggacggg

SEQ ID NO: 6561 - DNA, 23 bp, Homo sapiens
tcaaggatatggtgattcaaggg

SEQ ID NO: 6562 - DNA, 23 bp, Homo sapiens
gagtaactgactaaataagtagg

SEQ ID NO: 6563 - DNA, 23 bp, Homo sapiens
acatttgtttcacacgtcaaggg

SEQ ID NO: 6564 - DNA, 23 bp, Homo sapiens
ggcaacaaagaatagctcatagg

SEQ ID NO: 6565 - DNA, 23 bp, Homo sapiens
ttccaaccgtaatttagcacagg

SEQ ID NO: 6566 - DNA, 23 bp, Homo sapiens
gtcctgtgctaaattacggttgg

SEQ ID NO: 6567 - DNA, 23 bp, Homo sapiens
atcattgagctggtccccaaagg

SEQ ID NO: 6568 - DNA, 23 bp, Homo sapiens
atttcttatcacgattaagtggg

SEQ ID NO: 6569 - DNA, 23 bp, Homo sapiens
gtggaggcgcttttgcaatgagg

SEQ ID NO: 6570 - DNA, 23 bp, Homo sapiens
aaaagcagcactatggagcaggg

SEQ ID NO: 6571 - DNA, 23 bp, Homo sapiens
ggagaggggaagagaaagagcgg

SEQ ID NO: 6572 - DNA, 23 bp, Homo sapiens
atgtatatgtatacaatgagtgg

SEQ ID NO: 6573 - DNA, 23 bp, Homo sapiens
ccttaacatttcagacgacatgg

SEQ ID NO: 6574 - DNA, 23 bp, Homo sapiens
accatggcccagaacaggggtgg

SEQ ID NO: 6575 - DNA, 23 bp, Homo sapiens
ttacatttttgacctacatgtgg

SEQ ID NO: 6576 - DNA, 23 bp, Homo sapiens
tgctacttcacaacagtaagcgg

SEQ ID NO: 6577 - DNA, 23 bp, Homo sapiens
gaagttaagtctattctcaaagg

SEQ ID NO: 6578 - DNA, 23 bp, Homo sapiens
gggaccatggcccagaacagggg

SEQ ID NO: 6579 - DNA, 23 bp, Homo sapiens
gagataagtaagcagaggctggg

SEQ ID NO: 6580 - DNA, 23 bp, Homo sapiens
gacaccatcactatatggaacgg

SEQ ID NO: 6581 - DNA, 23 bp, Homo sapiens
ctaagcctattatttaggagtgg

SEQ ID NO: 6582 - DNA, 23 bp, Homo sapiens
gctacttcacaacagtaagcggg

SEQ ID NO: 6583 - DNA, 23 bp, Homo sapiens
gagaggggaagagaaagagcggg

SEQ ID NO: 6584 - DNA, 23 bp, Homo sapiens
tttattttaatcactaccaaagg

SEQ ID NO: 6585 - DNA, 23 bp, Homo sapiens
gatttgttattacaaccagctgg

SEQ ID NO: 6586 - DNA, 23 bp, Homo sapiens
ctatgagacaatcaaatacatgg

SEQ ID NO: 6587 - DNA, 23 bp, Homo sapiens
acttggctctggcaaccagctgg

SEQ ID NO: 6588 - DNA, 23 bp, Homo sapiens
ataataggcttagttatcaaggg

SEQ ID NO: 6589 - DNA, 23 bp, Homo sapiens
cagcccgttccatatagtgatgg

SEQ ID NO: 6590 - DNA, 23 bp, Homo sapiens
agggaccatggcccagaacaggg

SEQ ID NO: 6591 - DNA, 23 bp, Homo sapiens
tgatacacctcaaataaaagtgg

SEQ ID NO: 6592 - DNA, 23 bp, Homo sapiens
taatcactaccaaaggaatgagg

SEQ ID NO: 6593 - DNA, 23 bp, Homo sapiens
acttttactggacaattcaaggg

SEQ ID NO: 6594 - DNA, 23 bp, Homo sapiens
cattgaacttgtgaaaactcagg

SEQ ID NO: 6595 - DNA, 23 bp, Homo sapiens
ttttaatgaacgtggtggggggg

SEQ ID NO: 6596 - DNA, 23 bp, Homo sapiens
agatgcggtatgttgcttgctgg

SEQ ID NO: 6597 - DNA, 23 bp, Homo sapiens
tataccaaatgccactaagatgg

SEQ ID NO: 6598 - DNA, 23 bp, Homo sapiens
taatctttgctgaaattcaaggg

SEQ ID NO: 6599 - DNA, 23 bp, Homo sapiens
tggactagttcagatggagttgg

SEQ ID NO: 6600 - DNA, 23 bp, Homo sapiens
aagcaataacagcgaggctgagg

SEQ ID NO: 6601 - DNA, 23 bp, Homo sapiens
tgaatcacattcatcattggagg

SEQ ID NO: 6602 - DNA, 23 bp, Homo sapiens
tgactgctgtttttactggtcgg

SEQ ID NO: 6603 - DNA, 23 bp, Homo sapiens
aataaaaagatgactaacattgg

SEQ ID NO: 6604 - DNA, 23 bp, Homo sapiens
tcaggtctcactgtctctaaagg

SEQ ID NO: 6605 - DNA, 23 bp, Homo sapiens
tttttaagtcacctgagcatagg

SEQ ID NO: 6606 - DNA, 23 bp, Homo sapiens
actaaataagtaggtcaagaagg

SEQ ID NO: 6607 - DNA, 23 bp, Homo sapiens
atatagcttgcgttaaatgatgg

SEQ ID NO: 6608 - DNA, 23 bp, Homo sapiens
aacttgaatttaaacttccacgg

SEQ ID NO: 6609 - DNA, 23 bp, Homo sapiens
aggaaatatttatccctaagagg

SEQ ID NO: 6610 - DNA, 23 bp, Homo sapiens
ggaatagaaatgaagagggtagg

SEQ ID NO: 6611 - DNA, 23 bp, Homo sapiens
tttactcttttgatagtgaaggg

SEQ ID NO: 6612 - DNA, 23 bp, Homo sapiens
ataaaagattagtagaatatggg

SEQ ID NO: 6613 - DNA, 23 bp, Homo sapiens
agcctctcaaactattttgaggg

SEQ ID NO: 6614 - DNA, 23 bp, Homo sapiens
ttccacggttaccatcttagtgg

SEQ ID NO: 6615 - DNA, 23 bp, Homo sapiens
acaccatcactatatggaacggg

SEQ ID NO: 6616 - DNA, 23 bp, Homo sapiens
caatgagtggaaaatattagtgg

SEQ ID NO: 6617 - DNA, 23 bp, Homo sapiens
gcatgcttgagttcttctgctgg

SEQ ID NO: 6618 - DNA, 23 bp, Homo sapiens
cttgttcattgaaagctagaagg

SEQ ID NO: 6619 - DNA, 23 bp, Homo sapiens
cctgcagtcactgtacataaagg

SEQ ID NO: 6620 - DNA, 23 bp, Homo sapiens
cggttggaatcagcagatagtgg

SEQ ID NO: 6621 - DNA, 23 bp, Homo sapiens
caatgagtggataatattagtgg

SEQ ID NO: 6622 - DNA, 23 bp, Homo sapiens
tagcctctcaaactattttgagg

SEQ ID NO: 6623 - DNA, 23 bp, Homo sapiens
ctacatatgtacacctcttaggg

SEQ ID NO: 6624 - DNA, 23 bp, Homo sapiens
tatttcttatcacgattaagtgg

SEQ ID NO: 6625 - DNA, 23 bp, Homo sapiens
aatgaggctttctcagtcttggg

SEQ ID NO: 6626 - DNA, 23 bp, Homo sapiens
gcatattttgtaacataggcagg

SEQ ID NO: 6627 - DNA, 23 bp, Homo sapiens
atatggaacgggctgaaaatcgg

SEQ ID NO: 6628 - DNA, 23 bp, Homo sapiens
ttgtgtcctgtgctaaattacgg

SEQ ID NO: 6629 - DNA, 23 bp, Homo sapiens
cttcttccagcatctcataaggg

SEQ ID NO: 6630 - DNA, 23 bp, Homo sapiens
ttgagaatagacttaacttctgg

SEQ ID NO: 6631 - DNA, 23 bp, Homo sapiens
agtatgttgcattagaaaaaggg

SEQ ID NO: 6632 - DNA, 23 bp, Homo sapiens
gttaccatcttagtggcatttgg

SEQ ID NO: 6633 - DNA, 23 bp, Homo sapiens
acttagaatgagtacattgatgg

SEQ ID NO: 6634 - DNA, 23 bp, Homo sapiens
gccacccctgttctgggccatgg

SEQ ID NO: 6635 - DNA, 23 bp, Homo sapiens
ctttccttctgggaaggttaagg

SEQ ID NO: 6636 - DNA, 23 bp, Homo sapiens
atacagttcagagtgccttttgg

SEQ ID NO: 6637 - DNA, 23 bp, Homo sapiens
gacagtagaaaaacagtaatagg

SEQ ID NO: 6638 - DNA, 23 bp, Homo sapiens
tatttgacaccatcactatatgg

SEQ ID NO: 6639 - DNA, 23 bp, Homo sapiens
tgaattgtccagtaaaagtatgg

SEQ ID NO: 6640 - DNA, 23 bp, Homo sapiens
acatggctgctgaatttaatagg

SEQ ID NO: 6641 - DNA, 23 bp, Homo sapiens
ggatcatcacggtataaaatagg

SEQ ID NO: 6642 - DNA, 23 bp, Homo sapiens
ataatccactcctaaataatagg

SEQ ID NO: 6643 - DNA, 23 bp, Homo sapiens
gcatcaatctggtttagttctgg

SEQ ID NO: 6644 - DNA, 23 bp, Homo sapiens
aagggcttctaccatttaatagg

SEQ ID NO: 6645 - DNA, 23 bp, Homo sapiens
ataggttctggtacatttacagg

SEQ ID NO: 6646 - DNA, 23 bp, Homo sapiens
ggcatttgttaacttctatatgg

SEQ ID NO: 6647 - DNA, 23 bp, Homo sapiens
tattatgtctcattactaattgg

SEQ ID NO: 6648 - DNA, 23 bp, Homo sapiens
tctatttgacctctgcaaaatgg

SEQ ID NO: 6649 - DNA, 23 bp, Homo sapiens
catgatctggaaccatactgggg

SEQ ID NO: 6650 - DNA, 23 bp, Homo sapiens
aatggaacgttagatcaatgtgg

SEQ ID NO: 6651 - DNA, 23 bp, Homo sapiens
gcacaattaggaatgtcatgagg

SEQ ID NO: 6652 - DNA, 23 bp, Homo sapiens
agcaacctgatttagaacagagg

SEQ ID NO: 6653 - DNA, 23 bp, Homo sapiens
ggtcagggacagataaaacaggg

SEQ ID NO: 6654 - DNA, 23 bp, Homo sapiens
tgccaaatacaaaaagaaggggg

SEQ ID NO: 6655 - DNA, 23 bp, Homo sapiens
aaatggggaaggtaagacaaggg

SEQ ID NO: 6656 - DNA, 23 bp, Homo sapiens
atatgtatcccatagaacactgg

SEQ ID NO: 6657 - DNA, 23 bp, Homo sapiens
tattttgacagagaaagagtggg

SEQ ID NO: 6658 - DNA, 23 bp, Homo sapiens
aaaacgttagagagccaacaagg

SEQ ID NO: 6659 - DNA, 23 bp, Homo sapiens
aggttgctgagtaattcacctgg

SEQ ID NO: 6660 - DNA, 23 bp, Homo sapiens
ggcaaagttagaatacaacctgg

SEQ ID NO: 6661 - DNA, 23 bp, Homo sapiens
ggttaacattaaatgctgtgtgg

SEQ ID NO: 6662 - DNA, 23 bp, Homo sapiens
gtgtgtgtatttgagagagaggg

SEQ ID NO: 6663 - DNA, 23 bp, Homo sapiens
ggaagattctaagtatcaagtgg

SEQ ID NO: 6664 - DNA, 23 bp, Homo sapiens
gtatcaatatgtttgacactggg

SEQ ID NO: 6665 - DNA, 23 bp, Homo sapiens
agtaaaaaaaggacataggtggg

SEQ ID NO: 6666 - DNA, 23 bp, Homo sapiens
ccatcatcagatacgtagtgtgg

SEQ ID NO: 6667 - DNA, 23 bp, Homo sapiens
agccacatgcttaacactaaggg

SEQ ID NO: 6668 - DNA, 23 bp, Homo sapiens
ttgtcaatgaaaattaagcatgg

SEQ ID NO: 6669 - DNA, 23 bp, Homo sapiens
ggcataggaaaatggtagagtgg

SEQ ID NO: 6670 - DNA, 23 bp, Homo sapiens
aattcacctggaaacccagtcgg

SEQ ID NO: 6671 - DNA, 23 bp, Homo sapiens
ggggtattggaaaatatggaggg

SEQ ID NO: 6672 - DNA, 23 bp, Homo sapiens
tcaatacagttagatgagaaggg

SEQ ID NO: 6673 - DNA, 23 bp, Homo sapiens
gattctaagtatcaagtggtggg

SEQ ID NO: 6674 - DNA, 23 bp, Homo sapiens
cgtgaaagtggttatagtggagg

SEQ ID NO: 6675 - DNA, 23 bp, Homo sapiens
agattctaagtatcaagtggtgg

SEQ ID NO: 6676 - DNA, 23 bp, Homo sapiens
ataagcttgttagctgttagggg

SEQ ID NO: 6677 - DNA, 23 bp, Homo sapiens
cctatttgactggaatagtgtgg

SEQ ID NO: 6678 - DNA, 23 bp, Homo sapiens
aataaggtaagttaagattgggg

SEQ ID NO: 6679 - DNA, 23 bp, Homo sapiens
tctgccaaatacaaaaagaaggg

SEQ ID NO: 6680 - DNA, 23 bp, Homo sapiens
atgttttgtaaaatctgaagcgg

SEQ ID NO: 6681 - DNA, 23 bp, Homo sapiens
ggcccttagtgttaagcatgtgg

SEQ ID NO: 6682 - DNA, 23 bp, Homo sapiens
acattagcggagcgtgaaagtgg

SEQ ID NO: 6683 - DNA, 23 bp, Homo sapiens
gggatgaaacataatatggctgg

SEQ ID NO: 6684 - DNA, 23 bp, Homo sapiens
cacatattattataaccagcagg

SEQ ID NO: 6685 - DNA, 23 bp, Homo sapiens
tgtgccaacgacaatcgctatgg

SEQ ID NO: 6686 - DNA, 23 bp, Homo sapiens
ctgggaatcccagtaaatccagg

SEQ ID NO: 6687 - DNA, 23 bp, Homo sapiens
attcacctggaaacccagtcggg

SEQ ID NO: 6688 - DNA, 23 bp, Homo sapiens
attgaagtcttccacttgaaggg

SEQ ID NO: 6689 - DNA, 23 bp, Homo sapiens
caggagagagtatataaatgagg

SEQ ID NO: 6690 - DNA, 23 bp, Homo sapiens
cgtttcatttacccaacccaggg

SEQ ID NO: 6691 - DNA, 23 bp, Homo sapiens
tctagaagcaggattggcatagg

SEQ ID NO: 6692 - DNA, 23 bp, Homo sapiens
tggggttaattaaatccagctgg

SEQ ID NO: 6693 - DNA, 23 bp, Homo sapiens
gtaaaactaaccaactatgaagg

SEQ ID NO: 6694 - DNA, 23 bp, Homo sapiens
cttctcatctaactgtattgagg

SEQ ID NO: 6695 - DNA, 23 bp, Homo sapiens
acattgatctaacgttccattgg

SEQ ID NO: 6696 - DNA, 23 bp, Homo sapiens
ctaacgtttttcccttcaagtgg

SEQ ID NO: 6697 - DNA, 23 bp, Homo sapiens
ttaggcaatgcatttagccctgg

SEQ ID NO: 6698 - DNA, 23 bp, Homo sapiens
ccacactacgtatctgatgatgg

SEQ ID NO: 6699 - DNA, 23 bp, Homo sapiens
ataatttatcccaacagcactgg

SEQ ID NO: 6700 - DNA, 23 bp, Homo sapiens
tgttgaaacattaacattagcgg

SEQ ID NO: 6701 - DNA, 23 bp, Homo sapiens
cctgggttgggtaaatgaaacgg

SEQ ID NO: 6702 - DNA, 23 bp, Homo sapiens
gctgagtttgcataaggtgttgg

SEQ ID NO: 6703 - DNA, 23 bp, Homo sapiens
tcttaattagttcattccaatgg

SEQ ID NO: 6704 - DNA, 23 bp, Homo sapiens
aactttgccgagaatggtgttgg

SEQ ID NO: 6705 - DNA, 23 bp, Homo sapiens
tcatttttttctgtaggcaatgg

SEQ ID NO: 6706 - DNA, 23 bp, Homo sapiens
ttaattaaccccatcccgactgg

SEQ ID NO: 6707 - DNA, 23 bp, Homo sapiens
acttgtactttggttcctgctgg

SEQ ID NO: 6708 - DNA, 23 bp, Homo sapiens
attaaaaatctggtgatccttgg

SEQ ID NO: 6709 - DNA, 23 bp, Homo sapiens
actgtcagctacttgtactttgg

SEQ ID NO: 6710 - DNA, 23 bp, Homo sapiens
aatccaagtgcaggaaactatgg

SEQ ID NO: 6711 - DNA, 23 bp, Homo sapiens
ttaaatagaaatattttaaaggg

SEQ ID NO: 6712 - DNA, 23 bp, Homo sapiens
gcaggattggcataggaaaatgg

SEQ ID NO: 6713 - DNA, 23 bp, Homo sapiens
cctggggatgaaacataatatgg

SEQ ID NO: 6714 - DNA, 23 bp, Homo sapiens
gtcaggtgtcttgctccagctgg

SEQ ID NO: 6715 - DNA, 23 bp, Homo sapiens
cctaacagctaacaagcttatgg

SEQ ID NO: 6716 - DNA, 23 bp, Homo sapiens
tatactctctcctgtcatattgg

SEQ ID NO: 6717 - DNA, 23 bp, Homo sapiens
ggttgcaagtcaataaattatgg

SEQ ID NO: 6718 - DNA, 23 bp, Homo sapiens
aggcttctaagaagtcactgtgg

SEQ ID NO: 6719 - DNA, 23 bp, Homo sapiens
aaagaagttgaacctcatggcgg

SEQ ID NO: 6720 - DNA, 23 bp, Homo sapiens
tgattaagccaaaatcacagagg

SEQ ID NO: 6721 - DNA, 23 bp, Homo sapiens
gacaacggccaaaatcagtgtgg

SEQ ID NO: 6722 - DNA, 23 bp, Homo sapiens
ttcacatcacgacctcactgagg

SEQ ID NO: 6723 - DNA, 23 bp, Homo sapiens
taaggtacaactgtgtacggggg

SEQ ID NO: 6724 - DNA, 23 bp, Homo sapiens
ccacccagtagatttccatgtgg

SEQ ID NO: 6725 - DNA, 23 bp, Homo sapiens
agattgtacatagaaaactgagg

SEQ ID NO: 6726 - DNA, 23 bp, Homo sapiens
ctacggatagaagtagaccaagg

SEQ ID NO: 6727 - DNA, 23 bp, Homo sapiens
tcacgtcttgaagcaccaggtgg

SEQ ID NO: 6728 - DNA, 23 bp, Homo sapiens
tttaacaaatcagcccctagggg

SEQ ID NO: 6729 - DNA, 23 bp, Homo sapiens
aagcatgataagaatcatggagg

SEQ ID NO: 6730 - DNA, 23 bp, Homo sapiens
ttgttacaagtagaaaacagtgg

SEQ ID NO: 6731 - DNA, 23 bp, Homo sapiens
gtgtaagattgtgtctacagtgg

SEQ ID NO: 6732 - DNA, 23 bp, Homo sapiens
gttatacttgatacacagtgagg

SEQ ID NO: 6733 - DNA, 23 bp, Homo sapiens
tctgctgtttaactacagtgagg

SEQ ID NO: 6734 - DNA, 23 bp, Homo sapiens
tagcagatctagcagctctgggg

SEQ ID NO: 6735 - DNA, 23 bp, Homo sapiens
atatatgagagaaatcaacaagg

SEQ ID NO: 6736 - DNA, 23 bp, Homo sapiens
tatgcatcacctctaccacaagg

SEQ ID NO: 6737 - DNA, 23 bp, Homo sapiens
aatgagcagattatatactgggg

SEQ ID NO: 6738 - DNA, 23 bp, Homo sapiens
tatgtacctaggacctaatgggg

SEQ ID NO: 6739 - DNA, 23 bp, Homo sapiens
tgcttgcctagagcataacaggg

SEQ ID NO: 6740 - DNA, 23 bp, Homo sapiens
tattggcattcacatcccagtgg

SEQ ID NO: 6741 - DNA, 23 bp, Homo sapiens
taactgaaaactgaaaccagtgg

SEQ ID NO: 6742 - DNA, 23 bp, Homo sapiens
ctaagcgtctgcatacctggggg

SEQ ID NO: 6743 - DNA, 23 bp, Homo sapiens
gctcatctggacaatcacaaggg

SEQ ID NO: 6744 - DNA, 23 bp, Homo sapiens
tttgccttcagaccgccatgagg

SEQ ID NO: 6745 - DNA, 23 bp, Homo sapiens
actggacatagctaatcacacgg

SEQ ID NO: 6746 - DNA, 23 bp, Homo sapiens
gcagatgtgtgaacatctggagg

SEQ ID NO: 6747 - DNA, 23 bp, Homo sapiens
aagctgttcattgtgtacagcgg

SEQ ID NO: 6748 - DNA, 23 bp, Homo sapiens
ataacatcaagagaacacactgg

SEQ ID NO: 6749 - DNA, 23 bp, Homo sapiens
ttttttgctgaaactaaacgagg

SEQ ID NO: 6750 - DNA, 23 bp, Homo sapiens
tcaaacctaaggatggtgggggg

SEQ ID NO: 6751 - DNA, 23 bp, Homo sapiens
gaaaacgagaccataagcagtgg

SEQ ID NO: 6752 - DNA, 23 bp, Homo sapiens
agaacatccataataacacaagg

SEQ ID NO: 6753 - DNA, 23 bp, Homo sapiens
gctactctcctccctcaaagcgg

SEQ ID NO: 6754 - DNA, 23 bp, Homo sapiens
attgcagtaagagtaaatggggg

SEQ ID NO: 6755 - DNA, 23 bp, Homo sapiens
atgtggttgaaatgtgaccatgg

SEQ ID NO: 6756 - DNA, 23 bp, Homo sapiens
tctgtaagataaaaacatggagg

SEQ ID NO: 6757 - DNA, 23 bp, Homo sapiens
tatttatatagagcactaggagg

SEQ ID NO: 6758 - DNA, 23 bp, Homo sapiens
tatgtgggatggtgtcatggtgg

SEQ ID NO: 6759 - DNA, 23 bp, Homo sapiens
cctgatgaccagaaacccagggg

SEQ ID NO: 6760 - DNA, 23 bp, Homo sapiens
aaccacagaatgctttacagagg

SEQ ID NO: 6761 - DNA, 23 bp, Homo sapiens
tgtggtgctgtagagatatgggg

SEQ ID NO: 6762 - DNA, 23 bp, Homo sapiens
cagacctgcccttatcttggggg

SEQ ID NO: 6763 - DNA, 23 bp, Homo sapiens
gcagtgcagagggtttgtggtgg

SEQ ID NO: 6764 - DNA, 23 bp, Homo sapiens
acttctgtaagataaaaacatgg

SEQ ID NO: 6765 - DNA, 23 bp, Homo sapiens
gtaagtgtgtgtactatgagggg

SEQ ID NO: 6766 - DNA, 23 bp, Homo sapiens
taatgagaaatgcagccatgagg

SEQ ID NO: 6767 - DNA, 23 bp, Homo sapiens
aatgccaagaaaagtgaccgtgg

SEQ ID NO: 6768 - DNA, 23 bp, Homo sapiens
gactactattaaattaactgggg

SEQ ID NO: 6769 - DNA, 23 bp, Homo sapiens
ggtttccaaaacctgacacaggg

SEQ ID NO: 6770 - DNA, 23 bp, Homo sapiens
atttgaatatagacctcacatgg

SEQ ID NO: 6771 - DNA, 23 bp, Homo sapiens
atactgcaaactaaggacgtagg

SEQ ID NO: 6772 - DNA, 23 bp, Homo sapiens
agtgggatagtaatagtttgggg

SEQ ID NO: 6773 - DNA, 23 bp, Homo sapiens
tggctaatcggacttccctgagg

SEQ ID NO: 6774 - DNA, 23 bp, Homo sapiens
aatgggtacagaacacatggtgg

SEQ ID NO: 6775 - DNA, 23 bp, Homo sapiens
ataaactatttatgacactgcgg

SEQ ID NO: 6776 - DNA, 23 bp, Homo sapiens
agtaatgggactaagaccggagg

SEQ ID NO: 6777 - DNA, 23 bp, Homo sapiens
gccttgagaattgagaacagagg

SEQ ID NO: 6778 - DNA, 23 bp, Homo sapiens
taggtgttacgagtgttgagtgg

SEQ ID NO: 6779 - DNA, 23 bp, Homo sapiens
acgtaaatgttatttcccagtgg

SEQ ID NO: 6780 - DNA, 23 bp, Homo sapiens
gttggagtatactccctgtgtgg

SEQ ID NO: 6781 - DNA, 23 bp, Homo sapiens
gtgccaggtaagaagcgtagagg

SEQ ID NO: 6782 - DNA, 23 bp, Homo sapiens
gatgccataaatgactggagtgg

SEQ ID NO: 6783 - DNA, 23 bp, Homo sapiens
aaactatttatgacactgcgggg

SEQ ID NO: 6784 - DNA, 23 bp, Homo sapiens
atacagtgcaaaatacaaagagg

SEQ ID NO: 6785 - DNA, 23 bp, Homo sapiens
gtattcttaggttttgcgggggg

SEQ ID NO: 6786 - DNA, 23 bp, Homo sapiens
actatgatccatgatatgagagg

SEQ ID NO: 6787 - DNA, 23 bp, Homo sapiens
aatgagtaaccatccaacagagg

SEQ ID NO: 6788 - DNA, 23 bp, Homo sapiens
ttaaagagattatagcaactggg

SEQ ID NO: 6789 - DNA, 23 bp, Homo sapiens
taaggtgatataaaacctagagg

SEQ ID NO: 6790 - DNA, 23 bp, Homo sapiens
ctattactatgcctataatgcgg

SEQ ID NO: 6791 - DNA, 23 bp, Homo sapiens
atatagaaatgcatctaaggggg

SEQ ID NO: 6792 - DNA, 23 bp, Homo sapiens
agacgaatgtagtatgtctgggg

SEQ ID NO: 6793 - DNA, 23 bp, Homo sapiens
tgagcatcaacctccccacaggg

SEQ ID NO: 6794 - DNA, 23 bp, Homo sapiens
actctggcaaagtttcagaaggg

SEQ ID NO: 6795 - DNA, 23 bp, Homo sapiens
aaaagagacagccagaagtgggg

SEQ ID NO: 6796 - DNA, 23 bp, Homo sapiens
agttggaaaagtgaaatcggtgg

SEQ ID NO: 6797 - DNA, 23 bp, Homo sapiens
agtggaatagtaatagttggggg

SEQ ID NO: 6798 - DNA, 23 bp, Homo sapiens
taagaaaatcgtggtcccagtgg

SEQ ID NO: 6799 - DNA, 23 bp, Homo sapiens
ctcttctttagatttcccagcgg

SEQ ID NO: 6800 - DNA, 23 bp, Homo sapiens
gtaggaatagagcctaccagtgg

SEQ ID NO: 6801 - DNA, 23 bp, Homo sapiens
tgttaagaaactcaatacagagg

SEQ ID NO: 6802 - DNA, 23 bp, Homo sapiens
gtggaatagtaatagttgggggg

SEQ ID NO: 6803 - DNA, 23 bp, Homo sapiens
ttaaatatgaaatagtaacatgg

SEQ ID NO: 6804 - DNA, 23 bp, Homo sapiens
taggccagcagtactatggtggg

SEQ ID NO: 6805 - DNA, 23 bp, Homo sapiens
atatcttaaattcctcagagtgg

SEQ ID NO: 6806 - DNA, 23 bp, Homo sapiens
taggtaagaggaaaaatgcgagg

SEQ ID NO: 6807 - DNA, 23 bp, Homo sapiens
tggaaggcaagcctgtagagagg

SEQ ID NO: 6808 - DNA, 23 bp, Homo sapiens
ttttgtttagaaagaacatgggg

SEQ ID NO: 6809 - DNA, 23 bp, Homo sapiens
atagttttagtgagatgacaagg

SEQ ID NO: 6810 - DNA, 23 bp, Homo sapiens
actaagaaagagcactccagagg

SEQ ID NO: 6811 - DNA, 23 bp, Homo sapiens
ctttagtgtattcatatgtgagg

SEQ ID NO: 6812 - DNA, 23 bp, Homo sapiens
ccagctagtaagcacactcaggg

SEQ ID NO: 6813 - DNA, 23 bp, Homo sapiens
acttcacgtcttgaagcaccagg

SEQ ID NO: 6814 - DNA, 23 bp, Homo sapiens
aggtagagctctactagcagggg

SEQ ID NO: 6815 - DNA, 23 bp, Homo sapiens
ttcctaatacaaaccctgtgggg

SEQ ID NO: 6816 - DNA, 23 bp, Homo sapiens
agaaattgcatatattccagggg

SEQ ID NO: 6817 - DNA, 23 bp, Homo sapiens
ataggcatttccaaagactgtgg

SEQ ID NO: 6818 - DNA, 23 bp, Homo sapiens
ggaaagctttcctaatcaagggg

SEQ ID NO: 6819 - DNA, 23 bp, Homo sapiens
tattttggagagtcatcacaggg

SEQ ID NO: 6820 - DNA, 23 bp, Homo sapiens
cttctcttaagattccacaatgg

SEQ ID NO: 6821 - DNA, 23 bp, Homo sapiens
aatggcctgctaaagggcaaggg

SEQ ID NO: 6822 - DNA, 23 bp, Homo sapiens
ataatttctatctcccctagggg

SEQ ID NO: 6823 - DNA, 23 bp, Homo sapiens
gcttaagtgattgtcacctgcgg

SEQ ID NO: 6824 - DNA, 23 bp, Homo sapiens
tattttctaagcactactggagg

SEQ ID NO: 6825 - DNA, 23 bp, Homo sapiens
ctatatgaccatggtccaggagg

SEQ ID NO: 6826 - DNA, 23 bp, Homo sapiens
gagtatgatcttctataacacgg

SEQ ID NO: 6827 - DNA, 23 bp, Homo sapiens
atatgttgccaagaaatcagagg

SEQ ID NO: 6828 - DNA, 23 bp, Homo sapiens
tcaaaaaggttaagaacccgagg

SEQ ID NO: 6829 - DNA, 23 bp, Homo sapiens
gtaaaaacgttgtctcagcaggg

SEQ ID NO: 6830 - DNA, 23 bp, Homo sapiens
gtaggagtgttatcatactgagg

SEQ ID NO: 6831 - DNA, 23 bp, Homo sapiens
ttctgaaaatcataaagacaggg

SEQ ID NO: 6832 - DNA, 23 bp, Homo sapiens
cattgcataccatttagctgggg

SEQ ID NO: 6833 - DNA, 23 bp, Homo sapiens
atgggtacagaacacatggtggg

SEQ ID NO: 6834 - DNA, 23 bp, Homo sapiens
taggaatagagcctaccagtggg

SEQ ID NO: 6835 - DNA, 23 bp, Homo sapiens
tttgtcctatgtgacaacaatgg

SEQ ID NO: 6836 - DNA, 23 bp, Homo sapiens
agtggcctaaaagttagaagagg

SEQ ID NO: 6837 - DNA, 23 bp, Homo sapiens
agttagtacccatagaggtgagg

SEQ ID NO: 6838 - DNA, 23 bp, Homo sapiens
ccaccagctgagtctatctgtgg

SEQ ID NO: 6839 - DNA, 23 bp, Homo sapiens
tattgtcacataaataagagagg

SEQ ID NO: 6840 - DNA, 23 bp, Homo sapiens
gtaaaactaagaaacgtcagtgg

SEQ ID NO: 6841 - DNA, 23 bp, Homo sapiens
agtcagatcaacttaatgtgcgg

SEQ ID NO: 6842 - DNA, 23 bp, Homo sapiens
tgtttgggacagctactccaggg

SEQ ID NO: 6843 - DNA, 23 bp, Homo sapiens
ttgcagtaagagtaaatgggggg

SEQ ID NO: 6844 - DNA, 23 bp, Homo sapiens
tttttaacaaaaacttacaaggg

SEQ ID NO: 6845 - DNA, 23 bp, Homo sapiens
tatgctaaaacatatacctgtgg

SEQ ID NO: 6846 - DNA, 23 bp, Homo sapiens
aactgaagaaggcctgacgttgg

SEQ ID NO: 6847 - DNA, 23 bp, Homo sapiens
aaatagtattgagtgatgggtgg

SEQ ID NO: 6848 - DNA, 23 bp, Homo sapiens
atggtataagggcagtcctgggg

SEQ ID NO: 6849 - DNA, 23 bp, Homo sapiens
gtaatgggactaagaccggaggg

SEQ ID NO: 6850 - DNA, 23 bp, Homo sapiens
aagctgaatgattctccaagagg

SEQ ID NO: 6851 - DNA, 23 bp, Homo sapiens
agcagggatacagtggcaagtgg

SEQ ID NO: 6852 - DNA, 23 bp, Homo sapiens
aactgacaataaaacaaaggagg

SEQ ID NO: 6853 - DNA, 23 bp, Homo sapiens
attcttaactcacaagagagtgg

SEQ ID NO: 6854 - DNA, 23 bp, Homo sapiens
tgtcttactctacattcaggggg

SEQ ID NO: 6855 - DNA, 23 bp, Homo sapiens
taaaactatgagtcagcggtggg

SEQ ID NO: 6856 - DNA, 23 bp, Homo sapiens
ttctttactgagaaccaaagcgg

SEQ ID NO: 6857 - DNA, 23 bp, Homo sapiens
tcttcaaacactaattgtggtgg

SEQ ID NO: 6858 - DNA, 23 bp, Homo sapiens
tgactattcatgtgacacaaagg

SEQ ID NO: 6859 - DNA, 23 bp, Homo sapiens
ccaagatcagagcccatatgggg

SEQ ID NO: 6860 - DNA, 23 bp, Homo sapiens
tttcactgctcagcaatatgcgg

SEQ ID NO: 6861 - DNA, 23 bp, Homo sapiens
ttgggaggtcctaattacaatgg

SEQ ID NO: 6862 - DNA, 23 bp, Homo sapiens
catgtagctcacatatcccatgg

SEQ ID NO: 6863 - DNA, 23 bp, Homo sapiens
tcataaataaaactatctggtgg

SEQ ID NO: 6864 - DNA, 23 bp, Homo sapiens
taaacttaggacaattgtgacgg

SEQ ID NO: 6865 - DNA, 23 bp, Homo sapiens
tacgctcctttcagagactgtgg

SEQ ID NO: 6866 - DNA, 23 bp, Homo sapiens
acttcctgagaatggtgacacgg

SEQ ID NO: 6867 - DNA, 23 bp, Homo sapiens
gctagtagagctctacctgaggg

SEQ ID NO: 6868 - DNA, 23 bp, Homo sapiens
tgggagacaagcagatacatggg

SEQ ID NO: 6869 - DNA, 23 bp, Homo sapiens
ggcctgcatcagagtcatcaggg

SEQ ID NO: 6870 - DNA, 23 bp, Homo sapiens
ttagaaattataatcccactggg

SEQ ID NO: 6871 - DNA, 23 bp, Homo sapiens
attggcattcacatcccagtggg

SEQ ID NO: 6872 - DNA, 23 bp, Homo sapiens
attcctaaggaagaaacgagtgg

SEQ ID NO: 6873 - DNA, 23 bp, Homo sapiens
agaatgaggttaaggtaccatgg

SEQ ID NO: 6874 - DNA, 23 bp, Homo sapiens
agtacataaataaagacatgagg

SEQ ID NO: 6875 - DNA, 23 bp, Homo sapiens
gaaaacttgagagaaataggagg

SEQ ID NO: 6876 - DNA, 23 bp, Homo sapiens
gaactgataacaatgttgctcgg

SEQ ID NO: 6877 - DNA, 23 bp, Homo sapiens
aattagtaacaagatgagagagg

SEQ ID NO: 6878 - DNA, 23 bp, Homo sapiens
tggtggtttccctaacacaatgg

SEQ ID NO: 6879 - DNA, 23 bp, Homo sapiens
tatgaattatggttgcaggaggg

SEQ ID NO: 6880 - DNA, 23 bp, Homo sapiens
aattggcctataatacacctcgg

SEQ ID NO: 6881 - DNA, 23 bp, Homo sapiens
attctatgttaagaaaatcgtgg

SEQ ID NO: 6882 - DNA, 23 bp, Homo sapiens
ttgtctaggcccttaccaagagg

SEQ ID NO: 6883 - DNA, 23 bp, Homo sapiens
taagtatacctcctggaccatgg

SEQ ID NO: 6884 - DNA, 23 bp, Homo sapiens
catctccacatacatagcagtgg

SEQ ID NO: 6885 - DNA, 23 bp, Homo sapiens
actgaactcttagagagcagtgg

SEQ ID NO: 6886 - DNA, 23 bp, Homo sapiens
gcatgtggaaatctgtatgttgg

SEQ ID NO: 6887 - DNA, 23 bp, Homo sapiens
gtgtcttactctacattcagggg

SEQ ID NO: 6888 - DNA, 23 bp, Homo sapiens
tatatgagagaaatcaacaaggg

SEQ ID NO: 6889 - DNA, 23 bp, Homo sapiens
aaatccctggataggccaggtgg

SEQ ID NO: 6890 - DNA, 23 bp, Homo sapiens
tgttttctcttagttcagtgagg

SEQ ID NO: 6891 - DNA, 23 bp, Homo sapiens
gaatcatagacatacttcaaggg

SEQ ID NO: 6892 - DNA, 23 bp, Homo sapiens
agactaagaataaaaagtagggg

SEQ ID NO: 6893 - DNA, 23 bp, Homo sapiens
gccatgagcagaaaaagagtagg

SEQ ID NO: 6894 - DNA, 23 bp, Homo sapiens
gactcttgcttgatatagggggg

SEQ ID NO: 6895 - DNA, 23 bp, Homo sapiens
tagcactcctcagtactaccagg

SEQ ID NO: 6896 - DNA, 23 bp, Homo sapiens
gcctctgctctatatgaccatgg

SEQ ID NO: 6897 - DNA, 23 bp, Homo sapiens
tcacattgtttgcccccatgggg

SEQ ID NO: 6898 - DNA, 23 bp, Homo sapiens
gatatcaattggctgaacaaggg

SEQ ID NO: 6899 - DNA, 23 bp, Homo sapiens
tagcgatgtcttggcaacagtgg

SEQ ID NO: 6900 - DNA, 23 bp, Homo sapiens
gattaagccaaaatcacagaggg

SEQ ID NO: 6901 - DNA, 23 bp, Homo sapiens
ttcctgttgattagggcacacgg

SEQ ID NO: 6902 - DNA, 23 bp, Homo sapiens
tataggatgatctaagaactcgg

SEQ ID NO: 6903 - DNA, 23 bp, Homo sapiens
atgttcttacttatttaccaggg

SEQ ID NO: 6904 - DNA, 23 bp, Homo sapiens
ttgattttacttcaacctagagg

SEQ ID NO: 6905 - DNA, 23 bp, Homo sapiens
aagacagtgactaaaggcaatgg

SEQ ID NO: 6906 - DNA, 23 bp, Homo sapiens
tctcttaccataaacccacctgg

SEQ ID NO: 6907 - DNA, 23 bp, Homo sapiens
tcaatgaagcagggatacagtgg

SEQ ID NO: 6908 - DNA, 23 bp, Homo sapiens
ttctttctacgtttacaaggggg

SEQ ID NO: 6909 - DNA, 23 bp, Homo sapiens
atgaatgtgctcatgtgcatggg

SEQ ID NO: 6910 - DNA, 23 bp, Homo sapiens
acaccttcctatatctgggtagg

SEQ ID NO: 6911 - DNA, 23 bp, Homo sapiens
cctaacttcatatgaaacacggg

SEQ ID NO: 6912 - DNA, 23 bp, Homo sapiens
gattgtacatagaaaactgaggg

SEQ ID NO: 6913 - DNA, 23 bp, Homo sapiens
acacagcagtgaataggcacagg

SEQ ID NO: 6914 - DNA, 23 bp, Homo sapiens
aatcaaagtgaaacatgagaagg

SEQ ID NO: 6915 - DNA, 23 bp, Homo sapiens
tggcagtgtagtgcaatgactgg

SEQ ID NO: 6916 - DNA, 23 bp, Homo sapiens
atttctagcaagtctcctgaagg

SEQ ID NO: 6917 - DNA, 23 bp, Homo sapiens
gagcacacatccccttcatgtgg

SEQ ID NO: 6918 - DNA, 23 bp, Homo sapiens
catgcattgaaccaaaactcagg

SEQ ID NO: 6919 - DNA, 23 bp, Homo sapiens
ctggaagacaagctaagagaggg

SEQ ID NO: 6920 - DNA, 23 bp, Homo sapiens
ggtatgtaacttctaaacccagg

SEQ ID NO: 6921 - DNA, 23 bp, Homo sapiens
ccttcaactgtggaaacccaagg

SEQ ID NO: 6922 - DNA, 23 bp, Homo sapiens
gaaaacaagttggttacaggagg

SEQ ID NO: 6923 - DNA, 23 bp, Homo sapiens
agaaggtagagccacaacaaagg

SEQ ID NO: 6924 - DNA, 23 bp, Homo sapiens
gtttcccaaattgatccacaagg

SEQ ID NO: 6925 - DNA, 23 bp, Homo sapiens
attttatgaaatgagagcagtgg

SEQ ID NO: 6926 - DNA, 23 bp, Homo sapiens
atacgcaacatcagaataagggg

SEQ ID NO: 6927 - DNA, 23 bp, Homo sapiens
agcactctcttaatatagggagg

SEQ ID NO: 6928 - DNA, 23 bp, Homo sapiens
gaaggcaattcaatgaagcaggg

SEQ ID NO: 6929 - DNA, 23 bp, Homo sapiens
cagtaaaatcaataataaagggg

SEQ ID NO: 6930 - DNA, 23 bp, Homo sapiens
catattacatgaaagtgtgaggg

SEQ ID NO: 6931 - DNA, 23 bp, Homo sapiens
tggaattcaaaactgccagtagg

SEQ ID NO: 6932 - DNA, 23 bp, Homo sapiens
gtaacaacaataaagaattgtgg

SEQ ID NO: 6933 - DNA, 23 bp, Homo sapiens
aatgaaactctatcaaccgatgg

SEQ ID NO: 6934 - DNA, 23 bp, Homo sapiens
tggtttccaaaacctgacacagg

SEQ ID NO: 6935 - DNA, 23 bp, Homo sapiens
gtgtacggcaccatagtcaaggg

SEQ ID NO: 6936 - DNA, 23 bp, Homo sapiens
gtttcctaatacaaaccctgtgg

SEQ ID NO: 6937 - DNA, 23 bp, Homo sapiens
ccactcatagtaagccacacagg

SEQ ID NO: 6938 - DNA, 23 bp, Homo sapiens
gacatggttgattcatggagcgg

SEQ ID NO: 6939 - DNA, 23 bp, Homo sapiens
gcctaacgtttactagatgtagg

SEQ ID NO: 6940 - DNA, 23 bp, Homo sapiens
cgttcccattgagataagagtgg

SEQ ID NO: 6941 - DNA, 23 bp, Homo sapiens
ggaccattggacaaaccagatgg

SEQ ID NO: 6942 - DNA, 23 bp, Homo sapiens
ttaccatataaattaccaagagg

SEQ ID NO: 6943 - DNA, 23 bp, Homo sapiens
attggtgcctctttatatcgggg

SEQ ID NO: 6944 - DNA, 23 bp, Homo sapiens
ttagcgaggaagataaggggtgg

SEQ ID NO: 6945 - DNA, 23 bp, Homo sapiens
attctcacttaatgttccagtgg

SEQ ID NO: 6946 - DNA, 23 bp, Homo sapiens
gctactgtgccacctatcagtgg

SEQ ID NO: 6947 - DNA, 23 bp, Homo sapiens
agtacagaatggattgctggagg

SEQ ID NO: 6948 - DNA, 23 bp, Homo sapiens
tctgtcgggcataagaatgtcgg

SEQ ID NO: 6949 - DNA, 23 bp, Homo sapiens
tcttaataaaagttttctcgagg

SEQ ID NO: 6950 - DNA, 23 bp, Homo sapiens
atcttgggcagtcaacctcaggg

SEQ ID NO: 6951 - DNA, 23 bp, Homo sapiens
ggactcttgcttgatataggggg

SEQ ID NO: 6952 - DNA, 23 bp, Homo sapiens
tatggtcaggacattcacttggg

SEQ ID NO: 6953 - DNA, 23 bp, Homo sapiens
ggcagcatcagattaacctaggg

SEQ ID NO: 6954 - DNA, 23 bp, Homo sapiens
tcgataagatgattttggagcgg

SEQ ID NO: 6955 - DNA, 23 bp, Homo sapiens
caatgcttctcattaaaggacgg

SEQ ID NO: 6956 - DNA, 23 bp, Homo sapiens
acaagccccttaactgtcagtgg

SEQ ID NO: 6957 - DNA, 23 bp, Homo sapiens
aataaatgttatggacttcgggg

SEQ ID NO: 6958 - DNA, 23 bp, Homo sapiens
tgatgatagctttagaagcgtgg

SEQ ID NO: 6959 - DNA, 23 bp, Homo sapiens
tgtatagaagcaataaaaagggg

SEQ ID NO: 6960 - DNA, 23 bp, Homo sapiens
accatggtcatatagagcagagg

SEQ ID NO: 6961 - DNA, 23 bp, Homo sapiens
acacagcactcacagaactcagg

SEQ ID NO: 6962 - DNA, 23 bp, Homo sapiens
ctgcgaagtcctgaattcagagg

SEQ ID NO: 6963 - DNA, 23 bp, Homo sapiens
gttactcaactagagaaggtagg

SEQ ID NO: 6964 - DNA, 23 bp, Homo sapiens
agaactactgtatggatccgtgg

SEQ ID NO: 6965 - DNA, 23 bp, Homo sapiens
aatatagaaatgcatctaagggg

SEQ ID NO: 6966 - DNA, 23 bp, Homo sapiens
cagatctacacatagatagaggg

SEQ ID NO: 6967 - DNA, 23 bp, Homo sapiens
tctcccattggggacctacgtgg

SEQ ID NO: 6968 - DNA, 23 bp, Homo sapiens
cgtattcttaggttttgcggggg

SEQ ID NO: 6969 - DNA, 23 bp, Homo sapiens
tttctttctacgtttacaagggg

SEQ ID NO: 6970 - DNA, 23 bp, Homo sapiens
taatgtttataattatggggtgg

SEQ ID NO: 6971 - DNA, 23 bp, Homo sapiens
attctaaagacagcatctgacgg

SEQ ID NO: 6972 - DNA, 23 bp, Homo sapiens
gtgcgagtgtatctttctagggg

SEQ ID NO: 6973 - DNA, 23 bp, Homo sapiens
taatgtgcccgctttgagggagg

SEQ ID NO: 6974 - DNA, 23 bp, Homo sapiens
aaacacattacctgcccacaggg

SEQ ID NO: 6975 - DNA, 23 bp, Homo sapiens
aaactagagccagaataagaggg

SEQ ID NO: 6976 - DNA, 23 bp, Homo sapiens
tgtgatgattacagcagaggcgg

SEQ ID NO: 6977 - DNA, 23 bp, Homo sapiens
ttacattggccatttttctgggg

SEQ ID NO: 6978 - DNA, 23 bp, Homo sapiens
tctccatgtattgacaagatggg

SEQ ID NO: 6979 - DNA, 23 bp, Homo sapiens
ggaggtcctaattacaatggtgg

SEQ ID NO: 6980 - DNA, 23 bp, Homo sapiens
aagtctgagacttcaagagatgg

SEQ ID NO: 6981 - DNA, 23 bp, Homo sapiens
ttacagttaataatttcctgagg

SEQ ID NO: 6982 - DNA, 23 bp, Homo sapiens
ctaaaactatgagtcagcggtgg

SEQ ID NO: 6983 - DNA, 23 bp, Homo sapiens
ctatatgacagagttggcagagg

SEQ ID NO: 6984 - DNA, 23 bp, Homo sapiens
aatcatgatagaggatgcatggg

SEQ ID NO: 6985 - DNA, 23 bp, Homo sapiens
atccacatatgactcaaggtggg

SEQ ID NO: 6986 - DNA, 23 bp, Homo sapiens
attctcaaactaattaacaatgg

SEQ ID NO: 6987 - DNA, 23 bp, Homo sapiens
caacagcaacaacaaaagggggg

SEQ ID NO: 6988 - DNA, 23 bp, Homo sapiens
catgaccatagccaagtgtacgg

SEQ ID NO: 6989 - DNA, 23 bp, Homo sapiens
taactgacagtgagtgacaaagg

SEQ ID NO: 6990 - DNA, 23 bp, Homo sapiens
cacgttacattttaacagtgggg

SEQ ID NO: 6991 - DNA, 23 bp, Homo sapiens
gcgtattcttaggttttgcgggg

SEQ ID NO: 6992 - DNA, 23 bp, Homo sapiens
attgtatcagaaatatctaacgg

SEQ ID NO: 6993 - DNA, 23 bp, Homo sapiens
aaattgagcactgcttgaagggg

SEQ ID NO: 6994 - DNA, 23 bp, Homo sapiens
catgctctaaacaccactaaggg

SEQ ID NO: 6995 - DNA, 23 bp, Homo sapiens
atcagattatgtggatgcaatgg

SEQ ID NO: 6996 - DNA, 23 bp, Homo sapiens
ccattgctcaaacctaaggatgg

SEQ ID NO: 6997 - DNA, 23 bp, Homo sapiens
gtcattgcactacactgccatgg

SEQ ID NO: 6998 - DNA, 23 bp, Homo sapiens
aaatgtgatgattacagcagagg

SEQ ID NO: 6999 - DNA, 23 bp, Homo sapiens
attgagcagcgatgtgcacaggg

SEQ ID NO: 7000 - DNA, 23 bp, Homo sapiens
aaatgtttataagtttacacagg

SEQ ID NO: 7001 - DNA, 23 bp, Homo sapiens
aaatgtgtatgccctatggatgg

SEQ ID NO: 7002 - DNA, 23 bp, Homo sapiens
ttccacataatctcagaagtggg

SEQ ID NO: 7003 - DNA, 23 bp, Homo sapiens
ttacatctagggatacagactgg

SEQ ID NO: 7004 - DNA, 23 bp, Homo sapiens
atgcagtgacaatatcagaatgg

SEQ ID NO: 7005 - DNA, 23 bp, Homo sapiens
ttgcaaatctgtctaaacatggg

SEQ ID NO: 7006 - DNA, 23 bp, Homo sapiens
actatgctaggcacagggcaggg

SEQ ID NO: 7007 - DNA, 23 bp, Homo sapiens
ggggagaattttattattggggg

SEQ ID NO: 7008 - DNA, 23 bp, Homo sapiens
atgttagcgaggaagataagggg

SEQ ID NO: 7009 - DNA, 23 bp, Homo sapiens
aatgcctcttgatcaatctgagg

SEQ ID NO: 7010 - DNA, 23 bp, Homo sapiens
agtgctctcagactgaggatagg

SEQ ID NO: 7011 - DNA, 23 bp, Homo sapiens
aggtcagacagaatatggatagg

SEQ ID NO: 7012 - DNA, 23 bp, Homo sapiens
gcatattacatgaaagtgtgagg

SEQ ID NO: 7013 - DNA, 23 bp, Homo sapiens
aaatatatagaaactatgctagg

SEQ ID NO: 7014 - DNA, 23 bp, Homo sapiens
gctaagcgtctgcatacctgggg

SEQ ID NO: 7015 - DNA, 23 bp, Homo sapiens
caataaagaaacaaaaacctagg

SEQ ID NO: 7016 - DNA, 23 bp, Homo sapiens
gtatagctctttatcctcagagg

SEQ ID NO: 7017 - DNA, 23 bp, Homo sapiens
tcagcacaaaacatttatgtggg

SEQ ID NO: 7018 - DNA, 23 bp, Homo sapiens
tcattgaagtgaatccactctgg

SEQ ID NO: 7019 - DNA, 23 bp, Homo sapiens
actctcttatattacaatcgtgg

SEQ ID NO: 7020 - DNA, 23 bp, Homo sapiens
atatatttatatagagcactagg

SEQ ID NO: 7021 - DNA, 23 bp, Homo sapiens
cccctgtgaataacaaagtgagg

SEQ ID NO: 7022 - DNA, 23 bp, Homo sapiens
catacagatgaagtaaaagaggg

SEQ ID NO: 7023 - DNA, 23 bp, Homo sapiens
atagatgaaaagttccctgtggg

SEQ ID NO: 7024 - DNA, 23 bp, Homo sapiens
aattagaaaaatctttgcagggg

SEQ ID NO: 7025 - DNA, 23 bp, Homo sapiens
gtcttacagagaaatcataacgg

SEQ ID NO: 7026 - DNA, 23 bp, Homo sapiens
catggttgattcatggagcgggg

SEQ ID NO: 7027 - DNA, 23 bp, Homo sapiens
gttggttacaggaggaagcaggg

SEQ ID NO: 7028 - DNA, 23 bp, Homo sapiens
aacaactcaagagtgatgcaggg

SEQ ID NO: 7029 - DNA, 23 bp, Homo sapiens
ttcatatagccattgaagagggg

SEQ ID NO: 7030 - DNA, 23 bp, Homo sapiens
ataggctagaagaagagtagagg

SEQ ID NO: 7031 - DNA, 23 bp, Homo sapiens
aatccacatatgactcaaggtgg

SEQ ID NO: 7032 - DNA, 23 bp, Homo sapiens
acagaagtcacaatgatagtggg

SEQ ID NO: 7033 - DNA, 23 bp, Homo sapiens
atttatttaccatttatccaggg

SEQ ID NO: 7034 - DNA, 23 bp, Homo sapiens
tgtttcattattctcctaagggg

SEQ ID NO: 7035 - DNA, 23 bp, Homo sapiens
gtttcaaaatggacttaaggggg

SEQ ID NO: 7036 - DNA, 23 bp, Homo sapiens
ggaagctactcagtcagcatggg

SEQ ID NO: 7037 - DNA, 23 bp, Homo sapiens
ttatggctgcaaataagatgagg

SEQ ID NO: 7038 - DNA, 23 bp, Homo sapiens
tgtactcttgcctcttgaggagg

SEQ ID NO: 7039 - DNA, 23 bp, Homo sapiens
ttgaggagtatgaaaatgatggg

SEQ ID NO: 7040 - DNA, 23 bp, Homo sapiens
aatattccctgaaaacagtaggg

SEQ ID NO: 7041 - DNA, 23 bp, Homo sapiens
tgaatcacaaaaggcacgaaggg

SEQ ID NO: 7042 - DNA, 23 bp, Homo sapiens
ctcaggaagtcaaaataaagggg

SEQ ID NO: 7043 - DNA, 23 bp, Homo sapiens
ctaatacaaaccctgtggggagg

SEQ ID NO: 7044 - DNA, 23 bp, Homo sapiens
tttgtgtgtttatgaggacaggg

SEQ ID NO: 7045 - DNA, 23 bp, Homo sapiens
ggtcaaccacagtctctgaaagg

SEQ ID NO: 7046 - DNA, 23 bp, Homo sapiens
agcaaaacgaccacaaatagggg

SEQ ID NO: 7047 - DNA, 23 bp, Homo sapiens
tcttgtatgtgccgagaaggagg

SEQ ID NO: 7048 - DNA, 23 bp, Homo sapiens
atcttcagggcagtgatgcgggg

SEQ ID NO: 7049 - DNA, 23 bp, Homo sapiens
cctgtgtggcttactatgagtgg

SEQ ID NO: 7050 - DNA, 23 bp, Homo sapiens
ctagatgtaagattctgacctgg

SEQ ID NO: 7051 - DNA, 23 bp, Homo sapiens
ttatttctcctgcattaatgggg

SEQ ID NO: 7052 - DNA, 23 bp, Homo sapiens
attccacatggaaatctactggg

SEQ ID NO: 7053 - DNA, 23 bp, Homo sapiens
agaatcatgactctttgagaggg

SEQ ID NO: 7054 - DNA, 23 bp, Homo sapiens
gcctaacttcatatgaaacacgg

SEQ ID NO: 7055 - DNA, 23 bp, Homo sapiens
aatgttaaaaaatttaacatggg

SEQ ID NO: 7056 - DNA, 23 bp, Homo sapiens
acagagggttaccagtgacttgg

SEQ ID NO: 7057 - DNA, 23 bp, Homo sapiens
acagtacattctacatgcgttgg

SEQ ID NO: 7058 - DNA, 23 bp, Homo sapiens
acaaatggtctcctacaactagg

SEQ ID NO: 7059 - DNA, 23 bp, Homo sapiens
aagtaatgtgatttagtgtgagg

SEQ ID NO: 7060 - DNA, 23 bp, Homo sapiens
gtcccattacttgaaagaagggg

SEQ ID NO: 7061 - DNA, 23 bp, Homo sapiens
ctgttaccaaagggaatgggtgg

SEQ ID NO: 7062 - DNA, 23 bp, Homo sapiens
tctggggcaacattctgcaatgg

SEQ ID NO: 7063 - DNA, 23 bp, Homo sapiens
gtcctgactagctctcctgcagg

SEQ ID NO: 7064 - DNA, 23 bp, Homo sapiens
tagcatactgttgttgtgtgcgg

SEQ ID NO: 7065 - DNA, 23 bp, Homo sapiens
aataatatcaatgcaagcagagg

SEQ ID NO: 7066 - DNA, 23 bp, Homo sapiens
taagcatttgagaacatcagtgg

SEQ ID NO: 7067 - DNA, 23 bp, Homo sapiens
gatatacaagaagctgcagaagg

SEQ ID NO: 7068 - DNA, 23 bp, Homo sapiens
taaacaacaaaaactgtgagagg

SEQ ID NO: 7069 - DNA, 23 bp, Homo sapiens
aatatgatatttgtgtgtgcggg

SEQ ID NO: 7070 - DNA, 23 bp, Homo sapiens
tgatggactttacctaaggtggg

SEQ ID NO: 7071 - DNA, 23 bp, Homo sapiens
agagtcatcagggaaggtggtgg

SEQ ID NO: 7072 - DNA, 23 bp, Homo sapiens
ttatgaattatggttgcaggagg

SEQ ID NO: 7073 - DNA, 23 bp, Homo sapiens
tgagagggttaattctcaggagg

SEQ ID NO: 7074 - DNA, 23 bp, Homo sapiens
cactcatagtaagccacacaggg

SEQ ID NO: 7075 - DNA, 23 bp, Homo sapiens
taatgagccaatgatcctgatgg

SEQ ID NO: 7076 - DNA, 23 bp, Homo sapiens
tgtaatgtacagagaactgaagg

SEQ ID NO: 7077 - DNA, 23 bp, Homo sapiens
aagcaaagcacgaaaaccgcagg

SEQ ID NO: 7078 - DNA, 23 bp, Homo sapiens
ttattgtatttgtagttgggagg

SEQ ID NO: 7079 - DNA, 23 bp, Homo sapiens
aatgaatctttcaaaaggagagg

SEQ ID NO: 7080 - DNA, 23 bp, Homo sapiens
gctagagctaggaagtgaaaggg

SEQ ID NO: 7081 - DNA, 23 bp, Homo sapiens
agctcatctggacaatcacaagg

SEQ ID NO: 7082 - DNA, 23 bp, Homo sapiens
gctttatgaaacccacgagtggg

SEQ ID NO: 7083 - DNA, 23 bp, Homo sapiens
gccaataaaatacataagggagg

SEQ ID NO: 7084 - DNA, 23 bp, Homo sapiens
attggcctataatacacctcggg

SEQ ID NO: 7085 - DNA, 23 bp, Homo sapiens
gtggtactttcgactgtccatgg

SEQ ID NO: 7086 - DNA, 23 bp, Homo sapiens
aatacactcagtattcatgtagg

SEQ ID NO: 7087 - DNA, 23 bp, Homo sapiens
atctggtgataaacgttcagagg

SEQ ID NO: 7088 - DNA, 23 bp, Homo sapiens
ctaaagccaagatttgctgaagg

SEQ ID NO: 7089 - DNA, 23 bp, Homo sapiens
tgacaagaaataatctagagagg

SEQ ID NO: 7090 - DNA, 23 bp, Homo sapiens
caggtagagctctactagcaggg

SEQ ID NO: 7091 - DNA, 23 bp, Homo sapiens
ctgagggactactttctgagtgg

SEQ ID NO: 7092 - DNA, 23 bp, Homo sapiens
tttcaatgcacaaggctgaaagg

SEQ ID NO: 7093 - DNA, 23 bp, Homo sapiens
gcatattgctgagcagtgaaagg

SEQ ID NO: 7094 - DNA, 23 bp, Homo sapiens
tagactattttatgttagcgagg

SEQ ID NO: 7095 - DNA, 23 bp, Homo sapiens
agatttacagacacatagtaggg

SEQ ID NO: 7096 - DNA, 23 bp, Homo sapiens
tagaagtctaaacaaatgctggg

SEQ ID NO: 7097 - DNA, 23 bp, Homo sapiens
gcaatcttaactttctatggagg

SEQ ID NO: 7098 - DNA, 23 bp, Homo sapiens
agaatcatagacatacttcaagg

SEQ ID NO: 7099 - DNA, 23 bp, Homo sapiens
gtgtaaccaggtcatcatagtgg

SEQ ID NO: 7100 - DNA, 23 bp, Homo sapiens
tttgtcttatggcaatcgtgtgg

SEQ ID NO: 7101 - DNA, 23 bp, Homo sapiens
tgagttgctgtgacagtctgtgg

SEQ ID NO: 7102 - DNA, 23 bp, Homo sapiens
tcttggtcgttgaataacaatgg

SEQ ID NO: 7103 - DNA, 23 bp, Homo sapiens
gctcaaacctaaggatggtgggg

SEQ ID NO: 7104 - DNA, 23 bp, Homo sapiens
ccatatagctgctaggacaacgg

SEQ ID NO: 7105 - DNA, 23 bp, Homo sapiens
aagcactgatcaagaatgagagg

SEQ ID NO: 7106 - DNA, 23 bp, Homo sapiens
gtttgtaagattattaaggaagg

SEQ ID NO: 7107 - DNA, 23 bp, Homo sapiens
aactaagagcagcccaacacagg

SEQ ID NO: 7108 - DNA, 23 bp, Homo sapiens
ttcaggaacatgtattcccaagg

SEQ ID NO: 7109 - DNA, 23 bp, Homo sapiens
ggaaattattaacagaccagtgg

SEQ ID NO: 7110 - DNA, 23 bp, Homo sapiens
caagatgaatctcctttggaggg

SEQ ID NO: 7111 - DNA, 23 bp, Homo sapiens
ctgctcttatatctttccaaggg

SEQ ID NO: 7112 - DNA, 23 bp, Homo sapiens
tgacagtatggcttgagagaggg

SEQ ID NO: 7113 - DNA, 23 bp, Homo sapiens
tgttgttatgcatctttcagggg

SEQ ID NO: 7114 - DNA, 23 bp, Homo sapiens
tgtcaatgcctaactgatgaggg

SEQ ID NO: 7115 - DNA, 23 bp, Homo sapiens
ttaagctaggaaagaaagtgggg

SEQ ID NO: 7116 - DNA, 23 bp, Homo sapiens
ttcatcattccactgataggtgg

SEQ ID NO: 7117 - DNA, 23 bp, Homo sapiens
ttttctttctacgtttacaaggg

SEQ ID NO: 7118 - DNA, 23 bp, Homo sapiens
tttgcatatctgaatttctgagg

SEQ ID NO: 7119 - DNA, 23 bp, Homo sapiens
ggtgtgttatctgttaccaaagg

SEQ ID NO: 7120 - DNA, 23 bp, Homo sapiens
ttaacagctcctcttggtaaggg

SEQ ID NO: 7121 - DNA, 23 bp, Homo sapiens
cttgaatctttcaaacccccagg

SEQ ID NO: 7122 - DNA, 23 bp, Homo sapiens
tcaaatagaaagtattacaaagg

SEQ ID NO: 7123 - DNA, 23 bp, Homo sapiens
ggaatagagctattcatccctgg

SEQ ID NO: 7124 - DNA, 23 bp, Homo sapiens
ctaaggtacaactgtgtacgggg

SEQ ID NO: 7125 - DNA, 23 bp, Homo sapiens
ctgttaatggaaagtctggaagg

SEQ ID NO: 7126 - DNA, 23 bp, Homo sapiens
ataagactaaaagaaaggacagg

SEQ ID NO: 7127 - DNA, 23 bp, Homo sapiens
accaaatgtacatttggagaggg

SEQ ID NO: 7128 - DNA, 23 bp, Homo sapiens
catgtttcgaaatagagaagagg

SEQ ID NO: 7129 - DNA, 23 bp, Homo sapiens
ttaatcctgtagacaaaatgtgg

SEQ ID NO: 7130 - DNA, 23 bp, Homo sapiens
actcaaacagtttccagcaaggg

SEQ ID NO: 7131 - DNA, 23 bp, Homo sapiens
ctctaccatactaaaagcagtgg

SEQ ID NO: 7132 - DNA, 23 bp, Homo sapiens
tctataatattgtagtccatagg

SEQ ID NO: 7133 - DNA, 23 bp, Homo sapiens
tctgcctaacatttatcatgagg

SEQ ID NO: 7134 - DNA, 23 bp, Homo sapiens
tgaaataccgtatatagagaagg

SEQ ID NO: 7135 - DNA, 23 bp, Homo sapiens
ctgtttagcaaaactaaccctgg

SEQ ID NO: 7136 - DNA, 23 bp, Homo sapiens
ataggatttattccttgcagagg

SEQ ID NO: 7137 - DNA, 23 bp, Homo sapiens
atgtttcgaaatagagaagaggg

SEQ ID NO: 7138 - DNA, 23 bp, Homo sapiens
ctgtaatctctacgtctggaagg

SEQ ID NO: 7139 - DNA, 23 bp, Homo sapiens
atacaagattaatctccttgtgg

SEQ ID NO: 7140 - DNA, 23 bp, Homo sapiens
atgtgctccatatagctgctagg

SEQ ID NO: 7141 - DNA, 23 bp, Homo sapiens
ttaataacgataaaaagtaatgg

SEQ ID NO: 7142 - DNA, 23 bp, Homo sapiens
agtctagtaaatttggtaggggg

SEQ ID NO: 7143 - DNA, 23 bp, Homo sapiens
agtgatctatatgacagagttgg

SEQ ID NO: 7144 - DNA, 23 bp, Homo sapiens
atagatagagggacattccaagg

SEQ ID NO: 7145 - DNA, 23 bp, Homo sapiens
aatcttcccaggcaattctgagg

SEQ ID NO: 7146 - DNA, 23 bp, Homo sapiens
taatgtcactgtataggccaagg

SEQ ID NO: 7147 - DNA, 23 bp, Homo sapiens
catgggatatgtgagctacatgg

SEQ ID NO: 7148 - DNA, 23 bp, Homo sapiens
aaatcacatgaatggtaagaggg

SEQ ID NO: 7149 - DNA, 23 bp, Homo sapiens
actatacacaccaagtctgtagg

SEQ ID NO: 7150 - DNA, 23 bp, Homo sapiens
caaatttgaccaaaaaaggaagg

SEQ ID NO: 7151 - DNA, 23 bp, Homo sapiens
catgctgtactttacaggcatgg

SEQ ID NO: 7152 - DNA, 23 bp, Homo sapiens
tcataacatcttaaataagaggg

SEQ ID NO: 7153 - DNA, 23 bp, Homo sapiens
agaaatgtactaggtttcatggg

SEQ ID NO: 7154 - DNA, 23 bp, Homo sapiens
tcttatcagacatttcaccttgg

SEQ ID NO: 7155 - DNA, 23 bp, Homo sapiens
aatgtgtgttccatgtcaaatgg

SEQ ID NO: 7156 - DNA, 23 bp, Homo sapiens
tcatatagccattgaagaggggg

SEQ ID NO: 7157 - DNA, 23 bp, Homo sapiens
ggaagagtattcggggcagtggg

SEQ ID NO: 7158 - DNA, 23 bp, Homo sapiens
ctaccatttcaaaattggcatgg

SEQ ID NO: 7159 - DNA, 23 bp, Homo sapiens
tggtgccgtacacttggctatgg

SEQ ID NO: 7160 - DNA, 23 bp, Homo sapiens
agaataaacatgcagaggtaggg

SEQ ID NO: 7161 - DNA, 23 bp, Homo sapiens
tcactgtgttctgctatctgagg

SEQ ID NO: 7162 - DNA, 23 bp, Homo sapiens
cgaagcatgaaatattcagaagg

SEQ ID NO: 7163 - DNA, 23 bp, Homo sapiens
ggattactggagtagaggcaagg

SEQ ID NO: 7164 - DNA, 23 bp, Homo sapiens
attcataatatagtgcaagaagg

SEQ ID NO: 7165 - DNA, 23 bp, Homo sapiens
agtccgattagccagtcgctggg

SEQ ID NO: 7166 - DNA, 23 bp, Homo sapiens
gatagttataccaagcccctggg

SEQ ID NO: 7167 - DNA, 23 bp, Homo sapiens
tttctaggcatccaataatgtgg

SEQ ID NO: 7168 - DNA, 23 bp, Homo sapiens
tcctgatgaccagaaacccaggg

SEQ ID NO: 7169 - DNA, 23 bp, Homo sapiens
tcatttctaatttttctctgggg

SEQ ID NO: 7170 - DNA, 23 bp, Homo sapiens
cacccatctgtgcaaacgtgtgg

SEQ ID NO: 7171 - DNA, 23 bp, Homo sapiens
cttagtttgcagtataggggagg

SEQ ID NO: 7172 - DNA, 23 bp, Homo sapiens
gagaattccattcctaacctggg

SEQ ID NO: 7173 - DNA, 23 bp, Homo sapiens
tatagttactcaactagagaagg

SEQ ID NO: 7174 - DNA, 23 bp, Homo sapiens
acattcacaagcagcagcaaggg

SEQ ID NO: 7175 - DNA, 23 bp, Homo sapiens
ataaataaagacatgaggaaagg

SEQ ID NO: 7176 - DNA, 23 bp, Homo sapiens
ggttcccccaagataagggcagg

SEQ ID NO: 7177 - DNA, 23 bp, Homo sapiens
ttcaagggatccatgaacactgg

SEQ ID NO: 7178 - DNA, 23 bp, Homo sapiens
tactcacattgactttcttgggg

SEQ ID NO: 7179 - DNA, 23 bp, Homo sapiens
aggcagagaatgctcagcagtgg

SEQ ID NO: 7180 - DNA, 23 bp, Homo sapiens
ggaaagagctatcttaaggatgg

SEQ ID NO: 7181 - DNA, 23 bp, Homo sapiens
acattaccaagtcctgagaaagg

SEQ ID NO: 7182 - DNA, 23 bp, Homo sapiens
aatttcttgttgagccggaatgg

SEQ ID NO: 7183 - DNA, 23 bp, Homo sapiens
actctaaaattagatggcaaagg

SEQ ID NO: 7184 - DNA, 23 bp, Homo sapiens
ggagagctagtcaggactcaggg

SEQ ID NO: 7185 - DNA, 23 bp, Homo sapiens
ggactactattaaattaactggg

SEQ ID NO: 7186 - DNA, 23 bp, Homo sapiens
taatcagcaagcttaatctaggg

SEQ ID NO: 7187 - DNA, 23 bp, Homo sapiens
gaatttttaataataactaaggg

SEQ ID NO: 7188 - DNA, 23 bp, Homo sapiens
aattgtcccatgactgtgccagg

SEQ ID NO: 7189 - DNA, 23 bp, Homo sapiens
tcttcaggtttccctctgcaagg

SEQ ID NO: 7190 - DNA, 23 bp, Homo sapiens
tttaatggtatgtattaatgcgg

SEQ ID NO: 7191 - DNA, 23 bp, Homo sapiens
aggagatctttcaatatggatgg

SEQ ID NO: 7192 - DNA, 23 bp, Homo sapiens
tgtgctttgctctcaaagtgtgg

SEQ ID NO: 7193 - DNA, 23 bp, Homo sapiens
gttttaattttcccactggtagg

SEQ ID NO: 7194 - DNA, 23 bp, Homo sapiens
gctgtgatatacttcacattggg

SEQ ID NO: 7195 - DNA, 23 bp, Homo sapiens
tacacaggttaaaattgagaggg

SEQ ID NO: 7196 - DNA, 23 bp, Homo sapiens
tctcgctagctataaataccagg

SEQ ID NO: 7197 - DNA, 23 bp, Homo sapiens
actttaacaaatcagcccctagg

SEQ ID NO: 7198 - DNA, 23 bp, Homo sapiens
agagtcagcatttattctagagg

SEQ ID NO: 7199 - DNA, 23 bp, Homo sapiens
tgtttaatggtctttcacaatgg

SEQ ID NO: 7200 - DNA, 23 bp, Homo sapiens
tttttgttctaaagttaccctgg

SEQ ID NO: 7201 - DNA, 23 bp, Homo sapiens
taatagagctaagcttctagagg

SEQ ID NO: 7202 - DNA, 23 bp, Homo sapiens
cagtctagtaaatttggtagggg

SEQ ID NO: 7203 - DNA, 23 bp, Homo sapiens
gtatgtgccgagaaggaggctgg

SEQ ID NO: 7204 - DNA, 23 bp, Homo sapiens
tgataggaacataggaaagtcgg

SEQ ID NO: 7205 - DNA, 23 bp, Homo sapiens
tagtgcagtcatcataaatgagg

SEQ ID NO: 7206 - DNA, 23 bp, Homo sapiens
cggtctgaaggcaaattcaaagg

SEQ ID NO: 7207 - DNA, 23 bp, Homo sapiens
ggattaaaaccaaaccctaacgg

SEQ ID NO: 7208 - DNA, 23 bp, Homo sapiens
aaatacgtttttgtaaagcacgg

SEQ ID NO: 7209 - DNA, 23 bp, Homo sapiens
ccttcactttccacatgaagggg

SEQ ID NO: 7210 - DNA, 23 bp, Homo sapiens
agattaacgtgaagaaggctagg

SEQ ID NO: 7211 - DNA, 23 bp, Homo sapiens
ttactgttttatgaaaggatagg

SEQ ID NO: 7212 - DNA, 23 bp, Homo sapiens
tgtagaccatatcatggcaatgg

SEQ ID NO: 7213 - DNA, 23 bp, Homo sapiens
tgctgagtcacagttctcaaggg

SEQ ID NO: 7214 - DNA, 23 bp, Homo sapiens
acagacctgcccttatcttgggg

SEQ ID NO: 7215 - DNA, 23 bp, Homo sapiens
ctcaaacctaaggatggtggggg

SEQ ID NO: 7216 - DNA, 23 bp, Homo sapiens
tactatgagtggcagtgcagagg

SEQ ID NO: 7217 - DNA, 23 bp, Homo sapiens
ttctgaagcagaaaaatacatgg

SEQ ID NO: 7218 - DNA, 23 bp, Homo sapiens
aagaaaatcgtggtcccagtggg

SEQ ID NO: 7219 - DNA, 23 bp, Homo sapiens
aaaatatcaaagacaactaacgg

SEQ ID NO: 7220 - DNA, 23 bp, Homo sapiens
aagcaagcaagcaattaagaagg

SEQ ID NO: 7221 - DNA, 23 bp, Homo sapiens
cacacaacaacagtatgctatgg

SEQ ID NO: 7222 - DNA, 23 bp, Homo sapiens
cctattttctgattatgatgtgg

SEQ ID NO: 7223 - DNA, 23 bp, Homo sapiens
gactagctgtcacataagactgg

SEQ ID NO: 7224 - DNA, 23 bp, Homo sapiens
ggggcaataaaaataatgcttgg

SEQ ID NO: 7225 - DNA, 23 bp, Homo sapiens
cgctgggaaatctaaagaagagg

SEQ ID NO: 7226 - DNA, 23 bp, Homo sapiens
acaactgacaaaataactgatgg

SEQ ID NO: 7227 - DNA, 23 bp, Homo sapiens
cttgataagcacatgtacttggg

SEQ ID NO: 7228 - DNA, 23 bp, Homo sapiens
actcagtaacactctcctgcagg

SEQ ID NO: 7229 - DNA, 23 bp, Homo sapiens
tcctcactttgttattcacaggg

SEQ ID NO: 7230 - DNA, 23 bp, Homo sapiens
gcaaatgcacagaagctggtggg

SEQ ID NO: 7231 - DNA, 23 bp, Homo sapiens
agttaactgagaaagagtagagg

SEQ ID NO: 7232 - DNA, 23 bp, Homo sapiens
ttgacagtatggcttgagagagg

SEQ ID NO: 7233 - DNA, 23 bp, Homo sapiens
gtccacacgtttgcacagatggg

SEQ ID NO: 7234 - DNA, 23 bp, Homo sapiens
tatctgttaccaaagggaatggg

SEQ ID NO: 7235 - DNA, 23 bp, Homo sapiens
ctcccttagagctaaaaacaggg

SEQ ID NO: 7236 - DNA, 23 bp, Homo sapiens
attacaacagaagtagtggcagg

SEQ ID NO: 7237 - DNA, 23 bp, Homo sapiens
ttcgaaatagagaagagggatgg

SEQ ID NO: 7238 - DNA, 23 bp, Homo sapiens
gactcatcttaattttcacatgg

SEQ ID NO: 7239 - DNA, 23 bp, Homo sapiens
taaaaatgtctaaatgctagtgg

SEQ ID NO: 7240 - DNA, 23 bp, Homo sapiens
ctgacattaatagcttggatcgg

SEQ ID NO: 7241 - DNA, 23 bp, Homo sapiens
attttgaaacaaacttagcaagg

SEQ ID NO: 7242 - DNA, 23 bp, Homo sapiens
ttatggtcaggacattcacttgg

SEQ ID NO: 7243 - DNA, 23 bp, Homo sapiens
tttcctaatacaaaccctgtggg

SEQ ID NO: 7244 - DNA, 23 bp, Homo sapiens
tgttgaaccatatgaagcccagg

SEQ ID NO: 7245 - DNA, 23 bp, Homo sapiens
ttcctgatgaccagaaacccagg

SEQ ID NO: 7246 - DNA, 23 bp, Homo sapiens
gagaaagatggaagctaaggagg

SEQ ID NO: 7247 - DNA, 23 bp, Homo sapiens
tattaactctttaggatacaggg

SEQ ID NO: 7248 - DNA, 23 bp, Homo sapiens
gaaccaaaactcaggccgtaagg

SEQ ID NO: 7249 - DNA, 23 bp, Homo sapiens
gaaacaaacttagcaaggagtgg

SEQ ID NO: 7250 - DNA, 23 bp, Homo sapiens
ataaagggtaaattcaagccagg

SEQ ID NO: 7251 - DNA, 23 bp, Homo sapiens
gatggtataagggcagtcctggg

SEQ ID NO: 7252 - DNA, 23 bp, Homo sapiens
aggcagcatcagattaacctagg

SEQ ID NO: 7253 - DNA, 23 bp, Homo sapiens
ttttagaagagattaccatcagg

SEQ ID NO: 7254 - DNA, 23 bp, Homo sapiens
acagagagtcattactagatggg

SEQ ID NO: 7255 - DNA, 23 bp, Homo sapiens
gtaaatacttttcaatgagaggg

SEQ ID NO: 7256 - DNA, 23 bp, Homo sapiens
gggaaagctttcctaatcaaggg

SEQ ID NO: 7257 - DNA, 23 bp, Homo sapiens
catctgactttgattccacatgg

SEQ ID NO: 7258 - DNA, 23 bp, Homo sapiens
tctctaatctgcactagagaagg

SEQ ID NO: 7259 - DNA, 23 bp, Homo sapiens
tctatctatgtgtagatctgtgg

SEQ ID NO: 7260 - DNA, 23 bp, Homo sapiens
caaaaaatagaagccaatgtggg

SEQ ID NO: 7261 - DNA, 23 bp, Homo sapiens
tctaaggtacaactgtgtacggg

SEQ ID NO: 7262 - DNA, 23 bp, Homo sapiens
ccaacagcaacaacaaaaggggg

SEQ ID NO: 7263 - DNA, 23 bp, Homo sapiens
ggacagaagagtgtcttcctagg

SEQ ID NO: 7264 - DNA, 23 bp, Homo sapiens
actgcattatccttgtagacagg

SEQ ID NO: 7265 - DNA, 23 bp, Homo sapiens
tcacattttctcataggccaagg

SEQ ID NO: 7266 - DNA, 23 bp, Homo sapiens
ttgccacgtaggtccccaatggg

SEQ ID NO: 7267 - DNA, 23 bp, Homo sapiens
ttatgtaagacagtgactaaagg

SEQ ID NO: 7268 - DNA, 23 bp, Homo sapiens
ccccattcatatgtcatgaaggg

SEQ ID NO: 7269 - DNA, 23 bp, Homo sapiens
tacaatctttgcccactcgtggg

SEQ ID NO: 7270 - DNA, 23 bp, Homo sapiens
aaggaggaagaggacgaaagagg

SEQ ID NO: 7271 - DNA, 23 bp, Homo sapiens
gaatctttaatataggtagtggg

SEQ ID NO: 7272 - DNA, 23 bp, Homo sapiens
aagagatcatacttttactgtgg

SEQ ID NO: 7273 - DNA, 23 bp, Homo sapiens
taggatttattccttgcagaggg

SEQ ID NO: 7274 - DNA, 23 bp, Homo sapiens
ggcagagaatgctcagcagtggg

SEQ ID NO: 7275 - DNA, 23 bp, Homo sapiens
tgaaagctactctgttagatggg

SEQ ID NO: 7276 - DNA, 23 bp, Homo sapiens
ataaatgaccccattaatgcagg

SEQ ID NO: 7277 - DNA, 23 bp, Homo sapiens
aattgaatggaggtaaaactagg

SEQ ID NO: 7278 - DNA, 23 bp, Homo sapiens
acattggctttattttagaacgg

SEQ ID NO: 7279 - DNA, 23 bp, Homo sapiens
ttagcggtgttgcttttggttgg

SEQ ID NO: 7280 - DNA, 23 bp, Homo sapiens
cagagtaagtgaaaacaagttgg

SEQ ID NO: 7281 - DNA, 23 bp, Homo sapiens
tgtacagaaggatacaaggcagg

SEQ ID NO: 7282 - DNA, 23 bp, Homo sapiens
tatttagcattagaacctcatgg

SEQ ID NO: 7283 - DNA, 23 bp, Homo sapiens
tggaagctactcagtcagcatgg

SEQ ID NO: 7284 - DNA, 23 bp, Homo sapiens
gaactttgaaaggttatggaagg

SEQ ID NO: 7285 - DNA, 23 bp, Homo sapiens
agtaatagtaaatgaggctgggg

SEQ ID NO: 7286 - DNA, 23 bp, Homo sapiens
tagagcacgagcatttgtgcagg

SEQ ID NO: 7287 - DNA, 23 bp, Homo sapiens
atgattcattactataagcaggg

SEQ ID NO: 7288 - DNA, 23 bp, Homo sapiens
ttatcttcagggcagtgatgcgg

SEQ ID NO: 7289 - DNA, 23 bp, Homo sapiens
actcaagtgctctcagactgagg

SEQ ID NO: 7290 - DNA, 23 bp, Homo sapiens
atgtggtcaaatcaacccattgg

SEQ ID NO: 7291 - DNA, 23 bp, Homo sapiens
attctaatcaccccatctgaagg

SEQ ID NO: 7292 - DNA, 23 bp, Homo sapiens
gttaaaaaatttaacatgggagg

SEQ ID NO: 7293 - DNA, 23 bp, Homo sapiens
cattgtgtaccaagctcttgagg

SEQ ID NO: 7294 - DNA, 23 bp, Homo sapiens
aagtccgttagcacaaaagcagg

SEQ ID NO: 7295 - DNA, 23 bp, Homo sapiens
tttaacttatattttatacctgg

SEQ ID NO: 7296 - DNA, 23 bp, Homo sapiens
gaaaagagacagccagaagtggg

SEQ ID NO: 7297 - DNA, 23 bp, Homo sapiens
tatattagttcacttacataggg

SEQ ID NO: 7298 - DNA, 23 bp, Homo sapiens
atttatggtatctatggaagagg

SEQ ID NO: 7299 - DNA, 23 bp, Homo sapiens
ggctgaagtcatttaatccatgg

SEQ ID NO: 7300 - DNA, 23 bp, Homo sapiens
gtccttagtttgcagtatagggg

SEQ ID NO: 7301 - DNA, 23 bp, Homo sapiens
aggttactcattttattacaggg

SEQ ID NO: 7302 - DNA, 23 bp, Homo sapiens
gtctttgagtaacatatcccagg

SEQ ID NO: 7303 - DNA, 23 bp, Homo sapiens
tcacagttgtcatggatacatgg

SEQ ID NO: 7304 - DNA, 23 bp, Homo sapiens
acattaaatgataggaacatagg

SEQ ID NO: 7305 - DNA, 23 bp, Homo sapiens
tttcatttacataaaacatgtgg

SEQ ID NO: 7306 - DNA, 23 bp, Homo sapiens
ccaagcataattacccgtgatgg

SEQ ID NO: 7307 - DNA, 23 bp, Homo sapiens
agttactgcaactgaatgacagg

SEQ ID NO: 7308 - DNA, 23 bp, Homo sapiens
aatgtggaagtaacaaagacagg

SEQ ID NO: 7309 - DNA, 23 bp, Homo sapiens
tgcagtatgctccatccataggg

SEQ ID NO: 7310 - DNA, 23 bp, Homo sapiens
agagagacaactgtgcagacagg

SEQ ID NO: 7311 - DNA, 23 bp, Homo sapiens
ggcgttaaaaaaatccccatggg

SEQ ID NO: 7312 - DNA, 23 bp, Homo sapiens
ataattataagtgatatcacagg

SEQ ID NO: 7313 - DNA, 23 bp, Homo sapiens
aaggcagtcatggttcctctagg

SEQ ID NO: 7314 - DNA, 23 bp, Homo sapiens
tatgaccactgacagttaagggg

SEQ ID NO: 7315 - DNA, 23 bp, Homo sapiens
atggtgggaacaaactccactgg

SEQ ID NO: 7316 - DNA, 23 bp, Homo sapiens
agtcagagtatcaaaatcactgg

SEQ ID NO: 7317 - DNA, 23 bp, Homo sapiens
tctatggtatcgggataagatgg

SEQ ID NO: 7318 - DNA, 23 bp, Homo sapiens
gaagttactgcaatattaggagg

SEQ ID NO: 7319 - DNA, 23 bp, Homo sapiens
acagcaacaacaaaagggggggg

SEQ ID NO: 7320 - DNA, 23 bp, Homo sapiens
agttttttagaattcttgctggg

SEQ ID NO: 7321 - DNA, 23 bp, Homo sapiens
tgtaatagacactttgtggatgg

SEQ ID NO: 7322 - DNA, 23 bp, Homo sapiens
ttacacaggttaaaattgagagg

SEQ ID NO: 7323 - DNA, 23 bp, Homo sapiens
tacagttaataatttcctgaggg

SEQ ID NO: 7324 - DNA, 23 bp, Homo sapiens
gaaggttaggaattttacgttgg

SEQ ID NO: 7325 - DNA, 23 bp, Homo sapiens
ttaataatagtaaaaaagccagg

SEQ ID NO: 7326 - DNA, 23 bp, Homo sapiens
gtgattatagaggtgtaagcagg

SEQ ID NO: 7327 - DNA, 23 bp, Homo sapiens
cttcagcaatgtgatgagtaggg

SEQ ID NO: 7328 - DNA, 23 bp, Homo sapiens
agactatgcatgaagtactaagg

SEQ ID NO: 7329 - DNA, 23 bp, Homo sapiens
agttgagtaactatatatgtagg

SEQ ID NO: 7330 - DNA, 23 bp, Homo sapiens
atttgttaataggtgaccatcgg

SEQ ID NO: 7331 - DNA, 23 bp, Homo sapiens
agtcagatgccataaatgactgg

SEQ ID NO: 7332 - DNA, 23 bp, Homo sapiens
tcaggccaagtttctgccaaggg

SEQ ID NO: 7333 - DNA, 23 bp, Homo sapiens
agccacactaaagttatcaaagg

SEQ ID NO: 7334 - DNA, 23 bp, Homo sapiens
ctacaggtaataacatgacttgg

SEQ ID NO: 7335 - DNA, 23 bp, Homo sapiens
aatatgtcatgaattaataacgg

SEQ ID NO: 7336 - DNA, 23 bp, Homo sapiens
attactaggagattcaaaaacgg

SEQ ID NO: 7337 - DNA, 23 bp, Homo sapiens
taagttccatttgtattggtagg

SEQ ID NO: 7338 - DNA, 23 bp, Homo sapiens
ggtccctttatactcctgtaggg

SEQ ID NO: 7339 - DNA, 23 bp, Homo sapiens
ctttgtcatcaaaaaggcaatgg

SEQ ID NO: 7340 - DNA, 23 bp, Homo sapiens
gccacactaaagttatcaaaggg

SEQ ID NO: 7341 - DNA, 23 bp, Homo sapiens
gattttgtttagaaagaacatgg

SEQ ID NO: 7342 - DNA, 23 bp, Homo sapiens
tatgaaacactcatcagaaacgg

SEQ ID NO: 7343 - DNA, 23 bp, Homo sapiens
tggggagatcctctgttggatgg

SEQ ID NO: 7344 - DNA, 23 bp, Homo sapiens
aagaaatccctggataggccagg

SEQ ID NO: 7345 - DNA, 23 bp, Homo sapiens
acaaagtgctggaagtaaagtgg

SEQ ID NO: 7346 - DNA, 23 bp, Homo sapiens
gtgtgttatctgttaccaaaggg

SEQ ID NO: 7347 - DNA, 23 bp, Homo sapiens
aaaactcctaaagtcacagttgg

SEQ ID NO: 7348 - DNA, 23 bp, Homo sapiens
gtgaagcaataaatagaagaagg

SEQ ID NO: 7349 - DNA, 23 bp, Homo sapiens
tgctttatttgagcttagagagg

SEQ ID NO: 7350 - DNA, 23 bp, Homo sapiens
gttccatttcctccccacattgg

SEQ ID NO: 7351 - DNA, 23 bp, Homo sapiens
gataaactacaaagagtgcctgg

SEQ ID NO: 7352 - DNA, 23 bp, Homo sapiens
ggaacatgtattcccaaggttgg

SEQ ID NO: 7353 - DNA, 23 bp, Homo sapiens
tgaacctcatggcggtctgaagg

SEQ ID NO: 7354 - DNA, 23 bp, Homo sapiens
ggtaagtgtgtgtactatgaggg

SEQ ID NO: 7355 - DNA, 23 bp, Homo sapiens
aacagcaacaacaaaaggggggg

SEQ ID NO: 7356 - DNA, 23 bp, Homo sapiens
acacttgcaaaagtataactagg

SEQ ID NO: 7357 - DNA, 23 bp, Homo sapiens
gtaataggattacatttacctgg

SEQ ID NO: 7358 - DNA, 23 bp, Homo sapiens
ctaatttttttcagaatgggagg

SEQ ID NO: 7359 - DNA, 23 bp, Homo sapiens
aagctcttgttactttgagaggg

SEQ ID NO: 7360 - DNA, 23 bp, Homo sapiens
gcacaatgatttaatggctaggg

SEQ ID NO: 7361 - DNA, 23 bp, Homo sapiens
actatgagtggcagtgcagaggg

SEQ ID NO: 7362 - DNA, 23 bp, Homo sapiens
tcatgctctaaacaccactaagg

SEQ ID NO: 7363 - DNA, 23 bp, Homo sapiens
gtttgcttattcaacacccatgg

SEQ ID NO: 7364 - DNA, 23 bp, Homo sapiens
cctccaaaagatgagattcgagg

SEQ ID NO: 7365 - DNA, 23 bp, Homo sapiens
ctactctcctccctcaaagcggg

SEQ ID NO: 7366 - DNA, 23 bp, Homo sapiens
aacatatcccaggttaggaatgg

SEQ ID NO: 7367 - DNA, 23 bp, Homo sapiens
tttcatatagccattgaagaggg

SEQ ID NO: 7368 - DNA, 23 bp, Homo sapiens
ataatatcattattgtactcagg

SEQ ID NO: 7369 - DNA, 23 bp, Homo sapiens
aaaaatacaggaagaagaagagg

SEQ ID NO: 7370 - DNA, 23 bp, Homo sapiens
tgatgccaagaacacaactctgg

SEQ ID NO: 7371 - DNA, 23 bp, Homo sapiens
caaaaactatcccagcgaagagg

SEQ ID NO: 7372 - DNA, 23 bp, Homo sapiens
gcactgttagtgtagttgtaagg

SEQ ID NO: 7373 - DNA, 23 bp, Homo sapiens
ttcagggcagtgatgcggggtgg

SEQ ID NO: 7374 - DNA, 23 bp, Homo sapiens
ctcctattctgtaagttcaaagg

SEQ ID NO: 7375 - DNA, 23 bp, Homo sapiens
acaatggtattaaatattggtgg

SEQ ID NO: 7376 - DNA, 23 bp, Homo sapiens
gatttagtgtgaggaaagaaagg

SEQ ID NO: 7377 - DNA, 23 bp, Homo sapiens
atgtttggattcataagtgttgg

SEQ ID NO: 7378 - DNA, 23 bp, Homo sapiens
gtttgctgctggttggctggggg

SEQ ID NO: 7379 - DNA, 23 bp, Homo sapiens
tttaaatataccaaaatccacgg

SEQ ID NO: 7380 - DNA, 23 bp, Homo sapiens
tcactattttcattctgagacgg

SEQ ID NO: 7381 - DNA, 23 bp, Homo sapiens
ccatccttaggtttgagcaatgg

SEQ ID NO: 7382 - DNA, 23 bp, Homo sapiens
tttatagagcatttgtatggggg

SEQ ID NO: 7383 - DNA, 23 bp, Homo sapiens
taatgtggttgcgtaggcacagg

SEQ ID NO: 7384 - DNA, 23 bp, Homo sapiens
catttatgatgactgcactaagg

SEQ ID NO: 7385 - DNA, 23 bp, Homo sapiens
ctgaacataaatcacatgaatgg

SEQ ID NO: 7386 - DNA, 23 bp, Homo sapiens
tgtaaaacaatttattcccaagg

SEQ ID NO: 7387 - DNA, 23 bp, Homo sapiens
ggctgtgatatacttcacattgg

SEQ ID NO: 7388 - DNA, 23 bp, Homo sapiens
atctagagaggagcaatagtagg

SEQ ID NO: 7389 - DNA, 23 bp, Homo sapiens
tgtgaacaatgatttaaagtagg

SEQ ID NO: 7390 - DNA, 23 bp, Homo sapiens
cagtattcatgtaggctcccagg

SEQ ID NO: 7391 - DNA, 23 bp, Homo sapiens
ctgcttatagtaatgaatcatgg

SEQ ID NO: 7392 - DNA, 23 bp, Homo sapiens
tgaccaaaattggtcacagatgg

SEQ ID NO: 7393 - DNA, 23 bp, Homo sapiens
tcctacatctagtaaacgttagg

SEQ ID NO: 7394 - DNA, 23 bp, Homo sapiens
atttcaatagctggaaatgaggg

SEQ ID NO: 7395 - DNA, 23 bp, Homo sapiens
acattcttcctcacctctatggg

SEQ ID NO: 7396 - DNA, 23 bp, Homo sapiens
agcaagatttcaaagatagcagg

SEQ ID NO: 7397 - DNA, 23 bp, Homo sapiens
ggtcatttatatgatatgtcagg

SEQ ID NO: 7398 - DNA, 23 bp, Homo sapiens
atacctacacaacaactgtaagg

SEQ ID NO: 7399 - DNA, 23 bp, Homo sapiens
attatgttaacagctcctcttgg

SEQ ID NO: 7400 - DNA, 23 bp, Homo sapiens
tcacctattaacaaataagatgg

SEQ ID NO: 7401 - DNA, 23 bp, Homo sapiens
cagttttgatagaataaatgagg

SEQ ID NO: 7402 - DNA, 23 bp, Homo sapiens
gtatatttatacattccagttgg

SEQ ID NO: 7403 - DNA, 23 bp, Homo sapiens
tctggtctgaggaatactgctgg

SEQ ID NO: 7404 - DNA, 23 bp, Homo sapiens
atttcttctacgaaaagtccagg

SEQ ID NO: 7405 - DNA, 23 bp, Homo sapiens
gcctctttatatcggggaagagg

SEQ ID NO: 7406 - DNA, 23 bp, Homo sapiens
actccttctgtgccccaatacgg

SEQ ID NO: 7407 - DNA, 23 bp, Homo sapiens
gtgcccatcttgtcaatacatgg

SEQ ID NO: 7408 - DNA, 23 bp, Homo sapiens
ggatttcaaaatatgcctgatgg

SEQ ID NO: 7409 - DNA, 23 bp, Homo sapiens
aggactgcccttataccatcagg

SEQ ID NO: 7410 - DNA, 23 bp, Homo sapiens
atacaattatcaattaccttggg

SEQ ID NO: 7411 - DNA, 23 bp, Homo sapiens
atatatgatccttttttctgagg

SEQ ID NO: 7412 - DNA, 23 bp, Homo sapiens
gattactggagtagaggcaaggg

SEQ ID NO: 7413 - DNA, 23 bp, Homo sapiens
agttaagaagcagtggtctaggg

SEQ ID NO: 7414 - DNA, 23 bp, Homo sapiens
acaattatgtgccaattggaagg

SEQ ID NO: 7415 - DNA, 23 bp, Homo sapiens
gagttgataccatataaattggg

SEQ ID NO: 7416 - DNA, 23 bp, Homo sapiens
tcagcaatatgcggcacacctgg

SEQ ID NO: 7417 - DNA, 23 bp, Homo sapiens
aggattttgtgtttaaaaagggg

SEQ ID NO: 7418 - DNA, 23 bp, Homo sapiens
actgcaatattaggaggctatgg

SEQ ID NO: 7419 - DNA, 23 bp, Homo sapiens
tgtgtcttactctacattcaggg

SEQ ID NO: 7420 - DNA, 23 bp, Homo sapiens
atttacacttgagtcaacattgg

SEQ ID NO: 7421 - DNA, 23 bp, Homo sapiens
agaatgagtgggaaggtcacagg

SEQ ID NO: 7422 - DNA, 23 bp, Homo sapiens
atatctcaaaccataaatgatgg

SEQ ID NO: 7423 - DNA, 23 bp, Homo sapiens
tagacattgtgtttcttccaggg

SEQ ID NO: 7424 - DNA, 23 bp, Homo sapiens
acagaacaagatcagaaacttgg

SEQ ID NO: 7425 - DNA, 23 bp, Homo sapiens
aatgagcctcaaaaaatactagg

SEQ ID NO: 7426 - DNA, 23 bp, Homo sapiens
ggaagaaacgagtggaccattgg

SEQ ID NO: 7427 - DNA, 23 bp, Homo sapiens
ccttcagttacaccaaccttggg

SEQ ID NO: 7428 - DNA, 23 bp, Homo sapiens
cttgccacgtaggtccccaatgg

SEQ ID NO: 7429 - DNA, 23 bp, Homo sapiens
gcctcttccccgatataaagagg

SEQ ID NO: 7430 - DNA, 23 bp, Homo sapiens
ttcgggacttgaatcacaaaagg

SEQ ID NO: 7431 - DNA, 23 bp, Homo sapiens
gataaggagtcaggctccatagg

SEQ ID NO: 7432 - DNA, 23 bp, Homo sapiens
ttgtaatgttactcattcatggg

SEQ ID NO: 7433 - DNA, 23 bp, Homo sapiens
ctcgaatctcatcttttggaggg

SEQ ID NO: 7434 - DNA, 23 bp, Homo sapiens
gttggcacaaccaaaacctatgg

SEQ ID NO: 7435 - DNA, 23 bp, Homo sapiens
gaataattcataaatggagatgg

SEQ ID NO: 7436 - DNA, 23 bp, Homo sapiens
tggataactggtgaaagccttgg

SEQ ID NO: 7437 - DNA, 23 bp, Homo sapiens
gagttaaaccctgaattgtaggg

SEQ ID NO: 7438 - DNA, 23 bp, Homo sapiens
ttaataatacatgtaatgcatgg

SEQ ID NO: 7439 - DNA, 23 bp, Homo sapiens
tatcattattgtactcaggttgg

SEQ ID NO: 7440 - DNA, 23 bp, Homo sapiens
aagcatgttgaaaagcgtaatgg

SEQ ID NO: 7441 - DNA, 23 bp, Homo sapiens
aatatgtgtgaagaccagttagg

SEQ ID NO: 7442 - DNA, 23 bp, Homo sapiens
aaacagagatttttccctaacgg

SEQ ID NO: 7443 - DNA, 23 bp, Homo sapiens
tggatgatggactttacctaagg

SEQ ID NO: 7444 - DNA, 23 bp, Homo sapiens
agaatctttgtatcattggatgg

SEQ ID NO: 7445 - DNA, 23 bp, Homo sapiens
atcagtctagtaaatttggtagg

SEQ ID NO: 7446 - DNA, 23 bp, Homo sapiens
tgtcaattcaaatggtgcactgg

SEQ ID NO: 7447 - DNA, 23 bp, Homo sapiens
aggttattgtttacaaccatagg

SEQ ID NO: 7448 - DNA, 23 bp, Homo sapiens
tcaaactactattatatcaaggg

SEQ ID NO: 7449 - DNA, 23 bp, Homo sapiens
gcagagtaagaactactgtatgg

SEQ ID NO: 7450 - DNA, 23 bp, Homo sapiens
tgaaggttacacccagcgactgg

SEQ ID NO: 7451 - DNA, 23 bp, Homo sapiens
cagtcaaccttctatttccacgg

SEQ ID NO: 7452 - DNA, 23 bp, Homo sapiens
aagaatcatgactctttgagagg

SEQ ID NO: 7453 - DNA, 23 bp, Homo sapiens
ctctcaaatacctctccctcagg

SEQ ID NO: 7454 - DNA, 23 bp, Homo sapiens
aagttatgcttccttcagatggg

SEQ ID NO: 7455 - DNA, 23 bp, Homo sapiens
acatacagatgaagtaaaagagg

SEQ ID NO: 7456 - DNA, 23 bp, Homo sapiens
ttaactgtaaaataagatagagg

SEQ ID NO: 7457 - DNA, 23 bp, Homo sapiens
agctaaaaacaggggtaggaggg

SEQ ID NO: 7458 - DNA, 23 bp, Homo sapiens
aatcatttttaaatagccccagg

SEQ ID NO: 7459 - DNA, 23 bp, Homo sapiens
tcaagtaatgggactaagaccgg

SEQ ID NO: 7460 - DNA, 23 bp, Homo sapiens
gttgctaatatctagtcaaaggg

SEQ ID NO: 7461 - DNA, 23 bp, Homo sapiens
gcctgacaaactgccctcaatgg

SEQ ID NO: 7462 - DNA, 23 bp, Homo sapiens
gaatccgtgtcaccattctcagg

SEQ ID NO: 7463 - DNA, 23 bp, Homo sapiens
aactggactgtttaatgtgatgg

SEQ ID NO: 7464 - DNA, 23 bp, Homo sapiens
ttattgccatagagaaattgagg

SEQ ID NO: 7465 - DNA, 23 bp, Homo sapiens
ctattccactgctatgtatgtgg

SEQ ID NO: 7466 - DNA, 23 bp, Homo sapiens
aatgcgtgatgttcgtccactgg

SEQ ID NO: 7467 - DNA, 23 bp, Homo sapiens
tgagtactataaagtatttgagg

SEQ ID NO: 7468 - DNA, 23 bp, Homo sapiens
tgattgtgagccatttccattgg

SEQ ID NO: 7469 - DNA, 23 bp, Homo sapiens
agtagggcagatatttgccctgg

SEQ ID NO: 7470 - DNA, 23 bp, Homo sapiens
atttgttcatattaagacatagg

SEQ ID NO: 7471 - DNA, 23 bp, Homo sapiens
gtgcttcttgaagaaatccctgg

SEQ ID NO: 7472 - DNA, 23 bp, Homo sapiens
tgtgaagcattgatggagaaagg

SEQ ID NO: 7473 - DNA, 23 bp, Homo sapiens
gattttatgttagccatcacggg

SEQ ID NO: 7474 - DNA, 23 bp, Homo sapiens
ttggggccaaaaccgtcaatggg

SEQ ID NO: 7475 - DNA, 23 bp, Homo sapiens
aattagtgtttgaagatgacagg

SEQ ID NO: 7476 - DNA, 23 bp, Homo sapiens
gggtaagtgtgtgtactatgagg

SEQ ID NO: 7477 - DNA, 23 bp, Homo sapiens
gatgctgtctttagaatttgggg

SEQ ID NO: 7478 - DNA, 23 bp, Homo sapiens
taaggaagtgacttgctgcctgg

SEQ ID NO: 7479 - DNA, 23 bp, Homo sapiens
gatatgcaacttttactgacagg

SEQ ID NO: 7480 - DNA, 23 bp, Homo sapiens
gattaagctaggaaagaaagtgg

SEQ ID NO: 7481 - DNA, 23 bp, Homo sapiens
ttttctagaatttcaagatacgg

SEQ ID NO: 7482 - DNA, 23 bp, Homo sapiens
ccataaaagccctcttcgctggg

SEQ ID NO: 7483 - DNA, 23 bp, Homo sapiens
aagtggctatggccaacgtcagg

SEQ ID NO: 7484 - DNA, 23 bp, Homo sapiens
tcaagttttaattttcccactgg

SEQ ID NO: 7485 - DNA, 23 bp, Homo sapiens
acacatacatccgcatactaagg

SEQ ID NO: 7486 - DNA, 23 bp, Homo sapiens
cttttaaaatgagtagcagtagg

SEQ ID NO: 7487 - DNA, 23 bp, Homo sapiens
ggtgataaacgttcagaggttgg

SEQ ID NO: 7488 - DNA, 23 bp, Homo sapiens
ctgtgtcacctcaaattctgtgg

SEQ ID NO: 7489 - DNA, 23 bp, Homo sapiens
agggagtgtttgctgctggttgg

SEQ ID NO: 7490 - DNA, 23 bp, Homo sapiens
tctctcgacatgcctgttgtggg

SEQ ID NO: 7491 - DNA, 23 bp, Homo sapiens
gcacgtgtgcacatgcaagctgg

SEQ ID NO: 7492 - DNA, 23 bp, Homo sapiens
attttcctcttattgacttgagg

SEQ ID NO: 7493 - DNA, 23 bp, Homo sapiens
gcactgaacaggtcattagttgg

SEQ ID NO: 7494 - DNA, 23 bp, Homo sapiens
acagtaatgtgcccgctttgagg

SEQ ID NO: 7495 - DNA, 23 bp, Homo sapiens
ggatctgtgtgagattctgctgg

SEQ ID NO: 7496 - DNA, 23 bp, Homo sapiens
gagagctgtgaacaattgtaagg

SEQ ID NO: 7497 - DNA, 23 bp, Homo sapiens
tcttacagagaaatcataacggg

SEQ ID NO: 7498 - DNA, 23 bp, Homo sapiens
gtttctgccaagggacaggcagg

SEQ ID NO: 7499 - DNA, 23 bp, Homo sapiens
atatacatgattttccgttaggg

SEQ ID NO: 7500 - DNA, 23 bp, Homo sapiens
taataactaagggctaataaggg

SEQ ID NO: 7501 - DNA, 23 bp, Homo sapiens
caagaattagctctgcctgttgg

SEQ ID NO: 7502 - DNA, 23 bp, Homo sapiens
tttgggttctgtatgtacctagg

SEQ ID NO: 7503 - DNA, 23 bp, Homo sapiens
ccttcaacaaaactaatcttggg

SEQ ID NO: 7504 - DNA, 23 bp, Homo sapiens
aaaactctgctttccttccacgg

SEQ ID NO: 7505 - DNA, 23 bp, Homo sapiens
gtgtaaccttcaaacaccgctgg

SEQ ID NO: 7506 - DNA, 23 bp, Homo sapiens
caagatgcctcataggtaagagg

SEQ ID NO: 7507 - DNA, 23 bp, Homo sapiens
atatagtcgaagacttttcaggg

SEQ ID NO: 7508 - DNA, 23 bp, Homo sapiens
cccagaatacctcaagagcttgg

SEQ ID NO: 7509 - DNA, 23 bp, Homo sapiens
tcaggtagagctctactagcagg

SEQ ID NO: 7510 - DNA, 23 bp, Homo sapiens
tatatatgtagaaatgtactagg

SEQ ID NO: 7511 - DNA, 23 bp, Homo sapiens
ttcctgtttctgctgttagaggg

SEQ ID NO: 7512 - DNA, 23 bp, Homo sapiens
tttagtttgagcatgtcacttgg

SEQ ID NO: 7513 - DNA, 23 bp, Homo sapiens
atacaatctttgcccactcgtgg

SEQ ID NO: 7514 - DNA, 23 bp, Homo sapiens
atgccatctggtttgtccaatgg

SEQ ID NO: 7515 - DNA, 23 bp, Homo sapiens
tggaaattacttgacatccatgg

SEQ ID NO: 7516 - DNA, 23 bp, Homo sapiens
tcagactgcctctaaaatagagg

SEQ ID NO: 7517 - DNA, 23 bp, Homo sapiens
ttagtttgctaggtttgtagtgg

SEQ ID NO: 7518 - DNA, 23 bp, Homo sapiens
agttggaccaattttttgaaagg

SEQ ID NO: 7519 - DNA, 23 bp, Homo sapiens
cttgtaaacgtagaaagaaaagg

SEQ ID NO: 7520 - DNA, 23 bp, Homo sapiens
tcattgcataccatttagctggg

SEQ ID NO: 7521 - DNA, 23 bp, Homo sapiens
ctttcctcagattgatcaagagg

SEQ ID NO: 7522 - DNA, 23 bp, Homo sapiens
aaaaagagaataaatctaagagg

SEQ ID NO: 7523 - DNA, 23 bp, Homo sapiens
ttaggtgatcacagagtgccagg

SEQ ID NO: 7524 - DNA, 23 bp, Homo sapiens
tctactatataagaaacaattgg

SEQ ID NO: 7525 - DNA, 23 bp, Homo sapiens
agggaaggtggtggttaaaacgg

SEQ ID NO: 7526 - DNA, 23 bp, Homo sapiens
tatagattggacaataaggttgg

SEQ ID NO: 7527 - DNA, 23 bp, Homo sapiens
tcattggctcattatcttcaggg

SEQ ID NO: 7528 - DNA, 23 bp, Homo sapiens
tagaaattgcatatattccaggg

SEQ ID NO: 7529 - DNA, 23 bp, Homo sapiens
ttttctgtatagaatcagttggg

SEQ ID NO: 7530 - DNA, 23 bp, Homo sapiens
ggcttcctgactttaagaaaagg

SEQ ID NO: 7531 - DNA, 23 bp, Homo sapiens
ctaaaccttactcaaaatagtgg

SEQ ID NO: 7532 - DNA, 23 bp, Homo sapiens
gtcatatgacatcgtaaaagtgg

SEQ ID NO: 7533 - DNA, 23 bp, Homo sapiens
gctgaagtagtgattgtccttgg

SEQ ID NO: 7534 - DNA, 23 bp, Homo sapiens
aagtagacttagagagccatagg

SEQ ID NO: 7535 - DNA, 23 bp, Homo sapiens
ccaaattagagagcattagcagg

SEQ ID NO: 7536 - DNA, 23 bp, Homo sapiens
gatgaagattttaagtgccatgg

SEQ ID NO: 7537 - DNA, 23 bp, Homo sapiens
atagaaactatgctaggcacagg

SEQ ID NO: 7538 - DNA, 23 bp, Homo sapiens
aatttttttcagaatgggagggg

SEQ ID NO: 7539 - DNA, 23 bp, Homo sapiens
atgaatcagtgtttgaaaagagg

SEQ ID NO: 7540 - DNA, 23 bp, Homo sapiens
gtttctatgttcattttcctagg

SEQ ID NO: 7541 - DNA, 23 bp, Homo sapiens
tagctatgccttctatatgtagg

SEQ ID NO: 7542 - DNA, 23 bp, Homo sapiens
acatctaaacattttttggaagg

SEQ ID NO: 7543 - DNA, 23 bp, Homo sapiens
gctaataaagccttcaactgtgg

SEQ ID NO: 7544 - DNA, 23 bp, Homo sapiens
tttggtgtcctttatcgtcatgg

SEQ ID NO: 7545 - DNA, 23 bp, Homo sapiens
atcaatagtgagaatttatgtgg

SEQ ID NO: 7546 - DNA, 23 bp, Homo sapiens
tctttagcatttttaaacaatgg

SEQ ID NO: 7547 - DNA, 23 bp, Homo sapiens
ggaagagtctatatatagaaagg

SEQ ID NO: 7548 - DNA, 23 bp, Homo sapiens
atagcaaaggtagtgcttgaagg

SEQ ID NO: 7549 - DNA, 23 bp, Homo sapiens
tagaaggaaacacctgaaaccgg

SEQ ID NO: 7550 - DNA, 23 bp, Homo sapiens
attaagctaggaaagaaagtggg

SEQ ID NO: 7551 - DNA, 23 bp, Homo sapiens
agtagagctgactgaaagcctgg

SEQ ID NO: 7552 - DNA, 23 bp, Homo sapiens
aagagataagactaaaagaaagg

SEQ ID NO: 7553 - DNA, 23 bp, Homo sapiens
ttttctcagtggctggatgaggg

SEQ ID NO: 7554 - DNA, 23 bp, Homo sapiens
gtttccagcaagggttgcccagg

SEQ ID NO: 7555 - DNA, 23 bp, Homo sapiens
ctttaacaaatcagcccctaggg

SEQ ID NO: 7556 - DNA, 23 bp, Homo sapiens
ctaaatttacctaaataaaaggg

SEQ ID NO: 7557 - DNA, 23 bp, Homo sapiens
gcagcattatcaatttatccagg

SEQ ID NO: 7558 - DNA, 23 bp, Homo sapiens
atccacttgaaataagcaaatgg

SEQ ID NO: 7559 - DNA, 23 bp, Homo sapiens
caagaagcacagctactgtatgg

SEQ ID NO: 7560 - DNA, 23 bp, Homo sapiens
cgcacattccctttttcatgagg

SEQ ID NO: 7561 - DNA, 23 bp, Homo sapiens
taatataactttccattggaggg

SEQ ID NO: 7562 - DNA, 23 bp, Homo sapiens
agaattgtctgattcacaaaagg

SEQ ID NO: 7563 - DNA, 23 bp, Homo sapiens
ctaagttgtagaccatatcatgg

SEQ ID NO: 7564 - DNA, 23 bp, Homo sapiens
ttagttcagtgaggtagaaaggg

SEQ ID NO: 7565 - DNA, 23 bp, Homo sapiens
cttctaacttttaggccactggg

SEQ ID NO: 7566 - DNA, 23 bp, Homo sapiens
agaaagaaaaggttaggaaaggg

SEQ ID NO: 7567 - DNA, 23 bp, Homo sapiens
tgctggacttctaccattgaggg

SEQ ID NO: 7568 - DNA, 23 bp, Homo sapiens
ataacaaaatttaattctggtgg

SEQ ID NO: 7569 - DNA, 23 bp, Homo sapiens
aataaaatagtattgagtgatgg

SEQ ID NO: 7570 - DNA, 23 bp, Homo sapiens
ccaaaggagattcatcttgtggg

SEQ ID NO: 7571 - DNA, 23 bp, Homo sapiens
acattattcttctcaaggatggg

SEQ ID NO: 7572 - DNA, 23 bp, Homo sapiens
catcatatcaagttgcccatagg

SEQ ID NO: 7573 - DNA, 23 bp, Homo sapiens
agatagttataccaagcccctgg

SEQ ID NO: 7574 - DNA, 23 bp, Homo sapiens
tgattatctttaaatgtgacagg

SEQ ID NO: 7575 - DNA, 23 bp, Homo sapiens
cgagtgtgcatttatatatgagg

SEQ ID NO: 7576 - DNA, 23 bp, Homo sapiens
acaaagttatacaacacatatgg

SEQ ID NO: 7577 - DNA, 23 bp, Homo sapiens
tatcctctacgcttcttacctgg

SEQ ID NO: 7578 - DNA, 23 bp, Homo sapiens
ctcttttgcagaattttgtaggg

SEQ ID NO: 7579 - DNA, 23 bp, Homo sapiens
ttataatttctatctcccctagg

SEQ ID NO: 7580 - DNA, 23 bp, Homo sapiens
taatgtatttttgaaagcatcgg

SEQ ID NO: 7581 - DNA, 23 bp, Homo sapiens
ctcatccagccactgagaaaagg

SEQ ID NO: 7582 - DNA, 23 bp, Homo sapiens
attgattctgaaagatatcaagg

SEQ ID NO: 7583 - DNA, 23 bp, Homo sapiens
tatttcttctgttccaggatggg

SEQ ID NO: 7584 - DNA, 23 bp, Homo sapiens
ctggatcttatcctataaaaggg

SEQ ID NO: 7585 - DNA, 23 bp, Homo sapiens
tttaaaatgtgtatgccctatgg

SEQ ID NO: 7586 - DNA, 23 bp, Homo sapiens
cccttcactttccacatgaaggg

SEQ ID NO: 7587 - DNA, 23 bp, Homo sapiens
gcccagagcagaaattcaaatgg

SEQ ID NO: 7588 - DNA, 23 bp, Homo sapiens
aggtattgaaaattgcatatagg

SEQ ID NO: 7589 - DNA, 23 bp, Homo sapiens
tttacagttttactaaacattgg

SEQ ID NO: 7590 - DNA, 23 bp, Homo sapiens
actgggatgtgaatgccaatagg

SEQ ID NO: 7591 - DNA, 23 bp, Homo sapiens
gagaaaacacatcccattgacgg

SEQ ID NO: 7592 - DNA, 23 bp, Homo sapiens
atagaaatgaatctttcaaaagg

SEQ ID NO: 7593 - DNA, 23 bp, Homo sapiens
attttggtcaattttttcacagg

SEQ ID NO: 7594 - DNA, 23 bp, Homo sapiens
tctagtttataaaagtcatcagg

SEQ ID NO: 7595 - DNA, 23 bp, Homo sapiens
ggaagctataccaagaaaatggg

SEQ ID NO: 7596 - DNA, 23 bp, Homo sapiens
attctgtagtagttacaagtagg

SEQ ID NO: 7597 - DNA, 23 bp, Homo sapiens
gctaaatgtgaatgtctagtagg

SEQ ID NO: 7598 - DNA, 23 bp, Homo sapiens
cctcaagaggcaagagtacatgg

SEQ ID NO: 7599 - DNA, 23 bp, Homo sapiens
aaacatttggaatcaactgatgg

SEQ ID NO: 7600 - DNA, 23 bp, Homo sapiens
tataatttctatctcccctaggg

SEQ ID NO: 7601 - DNA, 23 bp, Homo sapiens
atttgcactcttctaccaaaagg

SEQ ID NO: 7602 - DNA, 23 bp, Homo sapiens
agatgactattccatgaagctgg

SEQ ID NO: 7603 - DNA, 23 bp, Homo sapiens
aattacttatttctacctactgg

SEQ ID NO: 7604 - DNA, 23 bp, Homo sapiens
gttgggattgagtcaagagttgg

SEQ ID NO: 7605 - DNA, 23 bp, Homo sapiens
atatgcaattttcaataccttgg

SEQ ID NO: 7606 - DNA, 23 bp, Homo sapiens
ttttcctttataacataatgagg

SEQ ID NO: 7607 - DNA, 23 bp, Homo sapiens
acacgtttggacattatttgagg

SEQ ID NO: 7608 - DNA, 23 bp, Homo sapiens
cttgtcacagaattttgccttgg

SEQ ID NO: 7609 - DNA, 23 bp, Homo sapiens
aatttattatcttggtccatggg

SEQ ID NO: 7610 - DNA, 23 bp, Homo sapiens
ttgttgtctaagctgaagaaagg

SEQ ID NO: 7611 - DNA, 23 bp, Homo sapiens
atatttttctgcctttgttgtgg

SEQ ID NO: 7612 - DNA, 23 bp, Homo sapiens
tgcacaagcatatttttggttgg

SEQ ID NO: 7613 - DNA, 23 bp, Homo sapiens
tcagactaagaataaaaagtagg

SEQ ID NO: 7614 - DNA, 23 bp, Homo sapiens
aactgaatttttgtaccagttgg

SEQ ID NO: 7615 - DNA, 23 bp, Homo sapiens
ctttgtagtttatcaagagcagg

SEQ ID NO: 7616 - DNA, 23 bp, Homo sapiens
caggagtaaaactttccaacagg

SEQ ID NO: 7617 - DNA, 23 bp, Homo sapiens
gtatcctaaagagttaatatagg

SEQ ID NO: 7618 - DNA, 23 bp, Homo sapiens
ttaaaatcatataatattggagg

SEQ ID NO: 7619 - DNA, 23 bp, Homo sapiens
tgttgtagttgttaatcaaaggg

SEQ ID NO: 7620 - DNA, 23 bp, Homo sapiens
atattttgaaatgagtcttaggg

SEQ ID NO: 7621 - DNA, 23 bp, Homo sapiens
cttctcctttggataatgcatgg

SEQ ID NO: 7622 - DNA, 23 bp, Homo sapiens
tagagaagagggatgggcatagg

SEQ ID NO: 7623 - DNA, 23 bp, Homo sapiens
acatttttattggctgcaaaagg

SEQ ID NO: 7624 - DNA, 23 bp, Homo sapiens
gaaaatggttgtgtatcaaaagg

SEQ ID NO: 7625 - DNA, 23 bp, Homo sapiens
attactccttgaattggctatgg

SEQ ID NO: 7626 - DNA, 23 bp, Homo sapiens
aagataagaataaatccaacagg

SEQ ID NO: 7627 - DNA, 23 bp, Homo sapiens
acagatctacacatagatagagg

SEQ ID NO: 7628 - DNA, 23 bp, Homo sapiens
ataaattctatttattgctaggg

SEQ ID NO: 7629 - DNA, 23 bp, Homo sapiens
ataattaatataagatagactgg

SEQ ID NO: 7630 - DNA, 23 bp, Homo sapiens
tgacatttacaaacccgttaggg

SEQ ID NO: 7631 - DNA, 23 bp, Homo sapiens
ttaagctaagataaattgtatgg

SEQ ID NO: 7632 - DNA, 23 bp, Homo sapiens
tgacccattattttatcaagtgg

SEQ ID NO: 7633 - DNA, 23 bp, Homo sapiens
ttctctgtggcaacaaagtaggg

SEQ ID NO: 7634 - DNA, 23 bp, Homo sapiens
tggaacccttgccctttagcagg

SEQ ID NO: 7635 - DNA, 23 bp, Homo sapiens
ttttttgtggatatatacatagg

SEQ ID NO: 7636 - DNA, 23 bp, Homo sapiens
agggatgtctgaaattccttagg

SEQ ID NO: 7637 - DNA, 23 bp, Homo sapiens
gggtagattgaaacttttgttgg

SEQ ID NO: 7638 - DNA, 23 bp, Homo sapiens
ttagcaggccatttctcctaagg

SEQ ID NO: 7639 - DNA, 23 bp, Homo sapiens
cgagcactgataagattagctgg

SEQ ID NO: 7640 - DNA, 23 bp, Homo sapiens
actacctacagcattgtgatagg

SEQ ID NO: 7641 - DNA, 23 bp, Homo sapiens
ctatctggtggtcttctcaatgg

SEQ ID NO: 7642 - DNA, 23 bp, Homo sapiens
ctgtggttcccccaagataaggg

SEQ ID NO: 7643 - DNA, 23 bp, Homo sapiens
atgttgggtttgatatcaattgg

SEQ ID NO: 7644 - DNA, 23 bp, Homo sapiens
cattaccttgacctcctgccagg

SEQ ID NO: 7645 - DNA, 23 bp, Homo sapiens
acgaattgtttctttccctccgg

SEQ ID NO: 7646 - DNA, 23 bp, Homo sapiens
agcaatttcctcttccctgatgg

SEQ ID NO: 7647 - DNA, 23 bp, Homo sapiens
tcaatgtacaaactaacttaggg

SEQ ID NO: 7648 - DNA, 23 bp, Homo sapiens
gttgcatccgtggaaatagaagg

SEQ ID NO: 7649 - DNA, 23 bp, Homo sapiens
aaatatgcctgatggtataaggg

SEQ ID NO: 7650 - DNA, 23 bp, Homo sapiens
tgacaggacataatgaactttgg

SEQ ID NO: 7651 - DNA, 23 bp, Homo sapiens
tagacacttgaaatatagattgg

SEQ ID NO: 7652 - DNA, 23 bp, Homo sapiens
ttacactgaaagttgctagaagg

SEQ ID NO: 7653 - DNA, 23 bp, Homo sapiens
cttgaattgaatcagagaaatgg

SEQ ID NO: 7654 - DNA, 23 bp, Homo sapiens
cagctaccacccattccctttgg

SEQ ID NO: 7655 - DNA, 23 bp, Homo sapiens
agaaatctacttagtttgctagg

SEQ ID NO: 7656 - DNA, 23 bp, Homo sapiens
atttgctctgaggcactctcagg

SEQ ID NO: 7657 - DNA, 23 bp, Homo sapiens
tgtccagatgagctttagcttgg

SEQ ID NO: 7658 - DNA, 23 bp, Homo sapiens
gcaaaggtaaaaataattgtagg

SEQ ID NO: 7659 - DNA, 23 bp, Homo sapiens
tttaaaaacctcatgaaaaaggg

SEQ ID NO: 7660 - DNA, 23 bp, Homo sapiens
atcatcatatttgtgttacatgg

SEQ ID NO: 7661 - DNA, 23 bp, Homo sapiens
tcaggtttacttgcaaggaatgg

SEQ ID NO: 7662 - DNA, 23 bp, Homo sapiens
atttttgtgggtacatactaggg

SEQ ID NO: 7663 - DNA, 23 bp, Homo sapiens
ataccagaattagagtatatcgg

SEQ ID NO: 7664 - DNA, 23 bp, Homo sapiens
accagaaagagtacaaataaggg

SEQ ID NO: 7665 - DNA, 23 bp, Homo sapiens
agagtgtcttcctaggcaatagg

SEQ ID NO: 7666 - DNA, 23 bp, Homo sapiens
gcaaaagcctatagacatacagg

SEQ ID NO: 7667 - DNA, 23 bp, Homo sapiens
tctaacctaaatgtatttgaggg

SEQ ID NO: 7668 - DNA, 23 bp, Homo sapiens
tccaattctgttctgcagacggg

SEQ ID NO: 7669 - DNA, 23 bp, Homo sapiens
ttgaaatgagtcttagggctagg

SEQ ID NO: 7670 - DNA, 23 bp, Homo sapiens
ttaatataagatagactggttgg

SEQ ID NO: 7671 - DNA, 23 bp, Homo sapiens
ttaacaagttatatgattcaggg

SEQ ID NO: 7672 - DNA, 23 bp, Homo sapiens
aattacctcaagtcaataagagg

SEQ ID NO: 7673 - DNA, 23 bp, Homo sapiens
tatgttagcgaggaagataaggg

SEQ ID NO: 7674 - DNA, 23 bp, Homo sapiens
tctctgagtttcaaacagattgg

SEQ ID NO: 7675 - DNA, 23 bp, Homo sapiens
tcatatataactcaatataccgg

SEQ ID NO: 7676 - DNA, 23 bp, Homo sapiens
ttgccatgccaattttgaaatgg

SEQ ID NO: 7677 - DNA, 23 bp, Homo sapiens
gctctatatgaccatggtccagg

SEQ ID NO: 7678 - DNA, 23 bp, Homo sapiens
gttaatataggatgtaatatagg

SEQ ID NO: 7679 - DNA, 23 bp, Homo sapiens
gtctgtacctacccagatatagg

SEQ ID NO: 7680 - DNA, 23 bp, Homo sapiens
gattagtaagaacctttctcagg

SEQ ID NO: 7681 - DNA, 23 bp, Homo sapiens
gtagcaaatgaatcttttgaagg

SEQ ID NO: 7682 - DNA, 23 bp, Homo sapiens
tggctgttaaaaagtcataaagg

SEQ ID NO: 7683 - DNA, 23 bp, Homo sapiens
gtatttttatctttttgacttgg

SEQ ID NO: 7684 - DNA, 23 bp, Homo sapiens
gagtttcttaacaaatacttagg

SEQ ID NO: 7685 - DNA, 23 bp, Homo sapiens
aatgaacctttattcccaaaagg

SEQ ID NO: 7686 - DNA, 23 bp, Homo sapiens
aggagaaatggcctgctaaaggg

SEQ ID NO: 7687 - DNA, 23 bp, Homo sapiens
gagatttacagacacatagtagg

SEQ ID NO: 7688 - DNA, 23 bp, Homo sapiens
agaaaattttgtaatgaggtggg

SEQ ID NO: 7689 - DNA, 23 bp, Homo sapiens
agcaaatcttggctttagccagg

SEQ ID NO: 7690 - DNA, 23 bp, Homo sapiens
ctagagctcaagtgaaatatggg

SEQ ID NO: 7691 - DNA, 23 bp, Homo sapiens
gtaaagactctaatatataaggg

SEQ ID NO: 7692 - DNA, 23 bp, Homo sapiens
cactaacttgacataacaaatgg

SEQ ID NO: 7693 - DNA, 23 bp, Homo sapiens
cccttcaaagcctttccttacgg

SEQ ID NO: 7694 - DNA, 23 bp, Homo sapiens
taaaaaatatggaatattaaggg

SEQ ID NO: 7695 - DNA, 23 bp, Homo sapiens
ccttttgatctagctatcctggg

SEQ ID NO: 7696 - DNA, 23 bp, Homo sapiens
acttttgcttatgttagctcagg

SEQ ID NO: 7697 - DNA, 23 bp, Homo sapiens
ttaccatttcaaattatgaatgg

SEQ ID NO: 7698 - DNA, 23 bp, Homo sapiens
gcgtctgttttttcatccaatgg

SEQ ID NO: 7699 - DNA, 23 bp, Homo sapiens
gtgtatagaagcaataaaaaggg

SEQ ID NO: 7700 - DNA, 23 bp, Homo sapiens
ttaactgtcagtggtcataaagg

SEQ ID NO: 7701 - DNA, 23 bp, Homo sapiens
ataactttgactcttatctctgg

SEQ ID NO: 7702 - DNA, 23 bp, Homo sapiens
gtccagatgagctttagcttggg

SEQ ID NO: 7703 - DNA, 23 bp, Homo sapiens
ggaatctttaatataggtagtgg

SEQ ID NO: 7704 - DNA, 23 bp, Homo sapiens
gctcaactttttttttgtatggg

SEQ ID NO: 7705 - DNA, 23 bp, Homo sapiens
gttaactgagaaagagtagaggg

SEQ ID NO: 7706 - DNA, 23 bp, Homo sapiens
cttcagtgagaacttcctgttgg

SEQ ID NO: 7707 - DNA, 23 bp, Homo sapiens
catgtctctagagatagaatagg

SEQ ID NO: 7708 - DNA, 23 bp, Homo sapiens
gtgcagacatggttgattcatgg

SEQ ID NO: 7709 - DNA, 23 bp, Homo sapiens
caattcttgccattgtgttaggg

SEQ ID NO: 7710 - DNA, 23 bp, Homo sapiens
aaatgaataaaacaataaaacgg

SEQ ID NO: 7711 - DNA, 23 bp, Homo sapiens
ggagacataagtatgtgaaatgg

SEQ ID NO: 7712 - DNA, 23 bp, Homo sapiens
tgctaagcgtctgcatacctggg

SEQ ID NO: 7713 - DNA, 23 bp, Homo sapiens
agagcatacaccccaataatggg

SEQ ID NO: 7714 - DNA, 23 bp, Homo sapiens
atagaggtagacgttttaaaggg

SEQ ID NO: 7715 - DNA, 23 bp, Homo sapiens
ctgatcttggattgaccagatgg

SEQ ID NO: 7716 - DNA, 23 bp, Homo sapiens
aacctcaacttaaacccaaatgg

SEQ ID NO: 7717 - DNA, 23 bp, Homo sapiens
tttgcgcaacaattttcaaatgg

SEQ ID NO: 7718 - DNA, 23 bp, Homo sapiens
attcaaagcctacatatagaagg

SEQ ID NO: 7719 - DNA, 23 bp, Homo sapiens
tgtataacacagcagtgaatagg

SEQ ID NO: 7720 - DNA, 23 bp, Homo sapiens
tattaacatgtcaattcaaatgg

SEQ ID NO: 7721 - DNA, 23 bp, Homo sapiens
acacccagcgactggctaatcgg

SEQ ID NO: 7722 - DNA, 23 bp, Homo sapiens
aagctgatagttcctaactatgg

SEQ ID NO: 7723 - DNA, 23 bp, Homo sapiens
gtgataggccagcagtactatgg

SEQ ID NO: 7724 - DNA, 23 bp, Homo sapiens
gcctgaggtttagttttaagtgg

SEQ ID NO: 7725 - DNA, 23 bp, Homo sapiens
agtgaaaactaagatgaaactgg

SEQ ID NO: 7726 - DNA, 23 bp, Homo sapiens
accaacagcaacaacaaaagggg

SEQ ID NO: 7727 - DNA, 23 bp, Homo sapiens
ttatgaccactgacagttaaggg

SEQ ID NO: 7728 - DNA, 23 bp, Homo sapiens
aggaagtcaccaccaataacagg

SEQ ID NO: 7729 - DNA, 23 bp, Homo sapiens
agttctatcttcttctgtaccgg

SEQ ID NO: 7730 - DNA, 23 bp, Homo sapiens
ctagaagtctaaacaaatgctgg

SEQ ID NO: 7731 - DNA, 23 bp, Homo sapiens
ttacatgtctgttttgtttgtgg

SEQ ID NO: 7732 - DNA, 23 bp, Homo sapiens
ataagttgagatatactttgagg

SEQ ID NO: 7733 - DNA, 23 bp, Homo sapiens
aggcagaagacagcttttaaggg

SEQ ID NO: 7734 - DNA, 23 bp, Homo sapiens
aacagaaccttttctcccattgg

SEQ ID NO: 7735 - DNA, 23 bp, Homo sapiens
gtttaaactttgcaatactaagg

SEQ ID NO: 7736 - DNA, 23 bp, Homo sapiens
cattaaataattaaagtagaagg

SEQ ID NO: 7737 - DNA, 23 bp, Homo sapiens
ttaaggaaagagctatcttaagg

SEQ ID NO: 7738 - DNA, 23 bp, Homo sapiens
tttcaattcatcagattatgtgg

SEQ ID NO: 7739 - DNA, 23 bp, Homo sapiens
ttattacatagtcagtactatgg

SEQ ID NO: 7740 - DNA, 23 bp, Homo sapiens
gaaagatgcataacaacaattgg

SEQ ID NO: 7741 - DNA, 23 bp, Homo sapiens
cactaccttctattaaaaagagg

SEQ ID NO: 7742 - DNA, 23 bp, Homo sapiens
ttaaagatagattgggggggtgg

SEQ ID NO: 7743 - DNA, 23 bp, Homo sapiens
tcacctctatgggtactaactgg

SEQ ID NO: 7744 - DNA, 23 bp, Homo sapiens
acaggaatatttgctctttgagg

SEQ ID NO: 7745 - DNA, 23 bp, Homo sapiens
tgtgcgagtgtatctttctaggg

SEQ ID NO: 7746 - DNA, 23 bp, Homo sapiens
aatctaagaacatttcagattgg

SEQ ID NO: 7747 - DNA, 23 bp, Homo sapiens
gaactcatctgtgtgtttagagg

SEQ ID NO: 7748 - DNA, 23 bp, Homo sapiens
ccgttgtcctagcagctatatgg

SEQ ID NO: 7749 - DNA, 23 bp, Homo sapiens
atattgcatgcgctaatcatagg

SEQ ID NO: 7750 - DNA, 23 bp, Homo sapiens
ttacatgtctaaataccaattgg

SEQ ID NO: 7751 - DNA, 23 bp, Homo sapiens
gatatggatatacttatagatgg

SEQ ID NO: 7752 - DNA, 23 bp, Homo sapiens
gattaaaaccaaaccctaacggg

SEQ ID NO: 7753 - DNA, 23 bp, Homo sapiens
acatcagtggtttagttttgagg

SEQ ID NO: 7754 - DNA, 23 bp, Homo sapiens
tggtcctgttctctgggtaatgg

SEQ ID NO: 7755 - DNA, 23 bp, Homo sapiens
actttgtcatcatcactcatagg

SEQ ID NO: 7756 - DNA, 23 bp, Homo sapiens
cttggggccaaaaccgtcaatgg

SEQ ID NO: 7757 - DNA, 23 bp, Homo sapiens
aagcaatacacactacatatcgg

SEQ ID NO: 7758 - DNA, 23 bp, Homo sapiens
ggacaatcacaagggtttagagg

SEQ ID NO: 7759 - DNA, 23 bp, Homo sapiens
catcagtgttgtatgccatctgg

SEQ ID NO: 7760 - DNA, 23 bp, Homo sapiens
tgccgtgtgccctaatcaacagg

SEQ ID NO: 7761 - DNA, 23 bp, Homo sapiens
actatcatgaaccagccttcagg

SEQ ID NO: 7762 - DNA, 23 bp, Homo sapiens
gtcattctgcagtccatcatagg

SEQ ID NO: 7763 - DNA, 23 bp, Homo sapiens
gcagtaaaatcaataataaaggg

SEQ ID NO: 7764 - DNA, 23 bp, Homo sapiens
gatttcatcaattccaaaacagg

SEQ ID NO: 7765 - DNA, 23 bp, Homo sapiens
ccaattcaaggagtaatagaagg

SEQ ID NO: 7766 - DNA, 23 bp, Homo sapiens
tagcacataactttgtatatagg

SEQ ID NO: 7767 - DNA, 23 bp, Homo sapiens
gcatgaatcacgaattttgctgg

SEQ ID NO: 7768 - DNA, 23 bp, Homo sapiens
tttccctacaggagtataaaggg

SEQ ID NO: 7769 - DNA, 23 bp, Homo sapiens
gtatttcacatgcagtttgttgg

SEQ ID NO: 7770 - DNA, 23 bp, Homo sapiens
aattacaattatgtgccaattgg

SEQ ID NO: 7771 - DNA, 23 bp, Homo sapiens
ttccattcctgcctgtcccttgg

SEQ ID NO: 7772 - DNA, 23 bp, Homo sapiens
cctcgaatctcatcttttggagg

SEQ ID NO: 7773 - DNA, 23 bp, Homo sapiens
ttttggttgtgccaacatatagg

SEQ ID NO: 7774 - DNA, 23 bp, Homo sapiens
catacgcaacatcagaataaggg

SEQ ID NO: 7775 - DNA, 23 bp, Homo sapiens
ataactgcacaccaagcatttgg

SEQ ID NO: 7776 - DNA, 23 bp, Homo sapiens
tgatttacttctaaaataagtgg

SEQ ID NO: 7777 - DNA, 23 bp, Homo sapiens
aggaaaaaaaacacaaaaaacgg

SEQ ID NO: 7778 - DNA, 23 bp, Homo sapiens
cacggattctattttctgcttgg

SEQ ID NO: 7779 - DNA, 23 bp, Homo sapiens
gatcacagagtgccaggaattgg

SEQ ID NO: 7780 - DNA, 23 bp, Homo sapiens
ttattttgacttcctgagaatgg

SEQ ID NO: 7781 - DNA, 23 bp, Homo sapiens
aagaaattccctacaattcaggg

SEQ ID NO: 7782 - DNA, 23 bp, Homo sapiens
attcctctagtattgctattcgg

SEQ ID NO: 7783 - DNA, 23 bp, Homo sapiens
ttttgtgttggtaaatttgtcgg

SEQ ID NO: 7784 - DNA, 23 bp, Homo sapiens
ggaaaaacacattaaatgatagg

SEQ ID NO: 7785 - DNA, 23 bp, Homo sapiens
tagttactaatatttttcatagg

SEQ ID NO: 7786 - DNA, 23 bp, Homo sapiens
atgaatttcatactgactactgg

SEQ ID NO: 7787 - DNA, 23 bp, Homo sapiens
ccagaacaatgagaccaaatagg

SEQ ID NO: 7788 - DNA, 23 bp, Homo sapiens
ggcacataattgtaattcatagg

SEQ ID NO: 7789 - DNA, 23 bp, Homo sapiens
ggtgtccccccaccatccttagg

SEQ ID NO: 7790 - DNA, 23 bp, Homo sapiens
tggccattcataatttgaaatgg

SEQ ID NO: 7791 - DNA, 23 bp, Homo sapiens
aatatattaaaaacatctattgg

SEQ ID NO: 7792 - DNA, 23 bp, Homo sapiens
tttcatatcctaaatggaaatgg

SEQ ID NO: 7793 - DNA, 23 bp, Homo sapiens
acagaaccttttctcccattggg

SEQ ID NO: 7794 - DNA, 23 bp, Homo sapiens
tctgcaaaagagattcagtttgg

SEQ ID NO: 7795 - DNA, 23 bp, Homo sapiens
aatgacttcagcctgctttgtgg

SEQ ID NO: 7796 - DNA, 23 bp, Homo sapiens
tgaagtttgagacagtaaaatgg

SEQ ID NO: 7797 - DNA, 23 bp, Homo sapiens
gtatgtacctaggacctaatggg

SEQ ID NO: 7798 - DNA, 23 bp, Homo sapiens
tcatagctccagtccccatatgg

SEQ ID NO: 7799 - DNA, 23 bp, Homo sapiens
ttaatgtagcacttcagctttgg

SEQ ID NO: 7800 - DNA, 23 bp, Homo sapiens
agagagcaggggaagaaaacagg

SEQ ID NO: 7801 - DNA, 23 bp, Homo sapiens
cagtgaggtgaatttattaaggg

SEQ ID NO: 7802 - DNA, 23 bp, Homo sapiens
ggaagtcattgaaaccttgtagg

SEQ ID NO: 7803 - DNA, 23 bp, Homo sapiens
catccacttgataaaataatggg

SEQ ID NO: 7804 - DNA, 23 bp, Homo sapiens
gcttgttaatgttaattccttgg

SEQ ID NO: 7805 - DNA, 23 bp, Homo sapiens
atttgcttccccctcttcaatgg

SEQ ID NO: 7806 - DNA, 23 bp, Homo sapiens
cgtttctatagctctcaaaaagg

SEQ ID NO: 7807 - DNA, 23 bp, Homo sapiens
gctatgcttccaaagttctaagg

SEQ ID NO: 7808 - DNA, 23 bp, Homo sapiens
ttactattcaagatattcttggg

SEQ ID NO: 7809 - DNA, 23 bp, Homo sapiens
tagaagacaatgcattttaacgg

SEQ ID NO: 7810 - DNA, 23 bp, Homo sapiens
gtaatggagtaaaatgttactgg

SEQ ID NO: 7811 - DNA, 23 bp, Homo sapiens
ttttttcacaggcatttaatggg

SEQ ID NO: 7812 - DNA, 23 bp, Homo sapiens
tggaaaggtgtatactactatgg

SEQ ID NO: 7813 - DNA, 23 bp, Homo sapiens
tgtcatttaaatcttataagagg

SEQ ID NO: 7814 - DNA, 23 bp, Homo sapiens
taactatcacattttctcatagg

SEQ ID NO: 7815 - DNA, 23 bp, Homo sapiens
cagttaactctaaaattagatgg

SEQ ID NO: 7816 - DNA, 23 bp, Homo sapiens
tctcaggaagtcaaaataaaggg

SEQ ID NO: 7817 - DNA, 23 bp, Homo sapiens
gataaattctatttattgctagg

SEQ ID NO: 7818 - DNA, 23 bp, Homo sapiens
cagcagtgctcatttctataggg

SEQ ID NO: 7819 - DNA, 23 bp, Homo sapiens
atattagtagttgggccaatagg

SEQ ID NO: 7820 - DNA, 23 bp, Homo sapiens
gcattacatgtattattaaaggg

SEQ ID NO: 7821 - DNA, 23 bp, Homo sapiens
agttttatagagcatttgtatgg

SEQ ID NO: 7822 - DNA, 23 bp, Homo sapiens
tttcctgatttccttccaattgg

SEQ ID NO: 7823 - DNA, 23 bp, Homo sapiens
gttttttcatccaatggaaatgg

SEQ ID NO: 7824 - DNA, 23 bp, Homo sapiens
gagtttggaatctttaatatagg

SEQ ID NO: 7825 - DNA, 23 bp, Homo sapiens
tgtatgtacctaggacctaatgg

SEQ ID NO: 7826 - DNA, 23 bp, Homo sapiens
catatattgatgttgcatatagg

SEQ ID NO: 7827 - DNA, 23 bp, Homo sapiens
caaaaaagtagccatttaaaggg

SEQ ID NO: 7828 - DNA, 23 bp, Homo sapiens
ttaaattctacattctctgctgg

SEQ ID NO: 7829 - DNA, 23 bp, Homo sapiens
cgcattataggcatagtaatagg

SEQ ID NO: 7830 - DNA, 23 bp, Homo sapiens
agtgctctatataaatatattgg

SEQ ID NO: 7831 - DNA, 23 bp, Homo sapiens
tttattatctaattgatccttgg

SEQ ID NO: 7832 - DNA, 23 bp, Homo sapiens
tctcccttagagctaaaaacagg

SEQ ID NO: 7833 - DNA, 23 bp, Homo sapiens
cctgtcccttggcagaaacttgg

SEQ ID NO: 7834 - DNA, 23 bp, Homo sapiens
ttcaatgtacaaactaacttagg

SEQ ID NO: 7835 - DNA, 23 bp, Homo sapiens
ggcctcacgccctataaaactgg

SEQ ID NO: 7836 - DNA, 23 bp, Homo sapiens
tgtttatgctcatagataatagg

SEQ ID NO: 7837 - DNA, 23 bp, Homo sapiens
acagcttcctgtatgtctatagg

SEQ ID NO: 7838 - DNA, 23 bp, Homo sapiens
actattttacaacaatatttggg

SEQ ID NO: 7839 - DNA, 23 bp, Homo sapiens
cttgttctcatggaatccttagg

SEQ ID NO: 7840 - DNA, 23 bp, Homo sapiens
ataaaacgtgattaattgcttgg

SEQ ID NO: 7841 - DNA, 23 bp, Homo sapiens
ctagaggcaggcaaaataactgg

SEQ ID NO: 7842 - DNA, 23 bp, Homo sapiens
gtaaatttagtacacaattaggg

SEQ ID NO: 7843 - DNA, 23 bp, Homo sapiens
acatggtgggaagcaataaaagg

SEQ ID NO: 7844 - DNA, 23 bp, Homo sapiens
tttctgcttctttagttgatagg

SEQ ID NO: 7845 - DNA, 23 bp, Homo sapiens
gtgcctcaagactaaatattggg

SEQ ID NO: 7846 - DNA, 23 bp, Homo sapiens
ggtccactcgtttcttccttagg

SEQ ID NO: 7847 - DNA, 23 bp, Homo sapiens
tgttctttctaaacaaaatccgg

SEQ ID NO: 7848 - DNA, 23 bp, Homo sapiens
atagtttctatatatttattagg

SEQ ID NO: 7849 - DNA, 23 bp, Homo sapiens
aatatacatgattttccgttagg

SEQ ID NO: 7850 - DNA, 23 bp, Homo sapiens
attcctgccaaattatttcatgg

SEQ ID NO: 7851 - DNA, 23 bp, Homo sapiens
tagagcataacagggaaaaaagg

SEQ ID NO: 7852 - DNA, 23 bp, Homo sapiens
atttgcagatttggtgaaaatgg

SEQ ID NO: 7853 - DNA, 23 bp, Homo sapiens
ttactcaaagacgttctatctgg

SEQ ID NO: 7854 - DNA, 23 bp, Homo sapiens
aaggaactatagaaaaagttagg

SEQ ID NO: 7855 - DNA, 23 bp, Homo sapiens
atattactttgtcatcaaaaagg

SEQ ID NO: 7856 - DNA, 23 bp, Homo sapiens
atgtccaactaataaaattaggg

SEQ ID NO: 7857 - DNA, 23 bp, Homo sapiens
tctgttgtaatttttcactctgg

SEQ ID NO: 7858 - DNA, 23 bp, Homo sapiens
agactcagtccccagaaaaatgg

SEQ ID NO: 7859 - DNA, 23 bp, Homo sapiens
tatttagttgtataagtaatggg

SEQ ID NO: 7860 - DNA, 23 bp, Homo sapiens
atactttgtatattcattgtagg

SEQ ID NO: 7861 - DNA, 23 bp, Homo sapiens
gtataatataaacacaaaatagg

SEQ ID NO: 7862 - DNA, 23 bp, Homo sapiens
ttactgatgtaatttataacagg

SEQ ID NO: 7863 - DNA, 23 bp, Homo sapiens
ctaaagttatgtcaaataactgg

SEQ ID NO: 7864 - DNA, 23 bp, Homo sapiens
gaatatatgcaatttctaatagg

SEQ ID NO: 7865 - DNA, 23 bp, Homo sapiens
gcaacagcgctgacatttctagg

SEQ ID NO: 7866 - DNA, 23 bp, Homo sapiens
gcttccctaattttattagttgg

SEQ ID NO: 7867 - DNA, 23 bp, Homo sapiens
attctgtctccccagctaaatgg

SEQ ID NO: 7868 - DNA, 23 bp, Homo sapiens
ctcactctcccaagtcaatatgg

SEQ ID NO: 7869 - DNA, 23 bp, Homo sapiens
ttacttttgcttttactgatagg

SEQ ID NO: 7870 - DNA, 23 bp, Homo sapiens
gtaagatcaaggaaaatattagg

SEQ ID NO: 7871 - DNA, 23 bp, Homo sapiens
cgcagttttccaaaagaaatcgg

SEQ ID NO: 7872 - DNA, 23 bp, Homo sapiens
ctaaacgaggtgaataaaatagg

SEQ ID NO: 7873 - DNA, 23 bp, Homo sapiens
agaatattacaataatattaagg

SEQ ID NO: 7874 - DNA, 23 bp, Homo sapiens
gtatgtctggggtagaaatttgg

SEQ ID NO: 7875 - DNA, 23 bp, Homo sapiens
gactaccactgcttttagtatgg

SEQ ID NO: 7876 - DNA, 23 bp, Homo sapiens
tatctttgtaatttgaaaatggg

SEQ ID NO: 7877 - DNA, 23 bp, Homo sapiens
ctgatattaatgccataaatagg

SEQ ID NO: 7878 - DNA, 23 bp, Homo sapiens
tatttcatcattccactgatagg

SEQ ID NO: 7879 - DNA, 23 bp, Homo sapiens
ttagaattttcctaaggaaatgg

SEQ ID NO: 7880 - DNA, 23 bp, Homo sapiens
taggttttattactgtttaatgg

SEQ ID NO: 7881 - DNA, 23 bp, Homo sapiens
gtcaaagtcaatttacataatgg

SEQ ID NO: 7882 - DNA, 23 bp, Homo sapiens
caccaacagcaacaacaaaaggg

SEQ ID NO: 7883 - DNA, 23 bp, Homo sapiens
actagagaaggtaggcaaatagg

SEQ ID NO: 7884 - DNA, 23 bp, Homo sapiens
tgaaatataaaccagcttcatgg

SEQ ID NO: 7885 - DNA, 23 bp, Homo sapiens
tctttccttttctcagtggctgg

SEQ ID NO: 7886 - DNA, 23 bp, Homo sapiens
taccccttctttcaagtaatggg

SEQ ID NO: 7887 - DNA, 23 bp, Homo sapiens
tcaaatataatacatttaaatgg

SEQ ID NO: 7888 - DNA, 23 bp, Homo sapiens
ttttccctacaggagtataaagg

SEQ ID NO: 7889 - DNA, 23 bp, Homo sapiens
aatttagtcaaatttattacagg

SEQ ID NO: 7890 - DNA, 23 bp, Homo sapiens
gcacttacatgaatgaaaaatgg

SEQ ID NO: 7891 - DNA, 23 bp, Homo sapiens
gatggtaaatgagaataaaatgg

SEQ ID NO: 7892 - DNA, 23 bp, Homo sapiens
aggtgttccttctctatatacgg

SEQ ID NO: 7893 - DNA, 23 bp, Homo sapiens
gccttacctcaatttctctatgg

SEQ ID NO: 7894 - DNA, 23 bp, Homo sapiens
ctatatttgtattattttagagg

SEQ ID NO: 7895 - DNA, 23 bp, Homo sapiens
acaaatatcttcttattatgagg

SEQ ID NO: 7896 - DNA, 23 bp, Homo sapiens
gtcctcataaacacacaaaatgg

SEQ ID NO: 7897 - DNA, 23 bp, Homo sapiens
tgtctcctctttttaatagaagg

SEQ ID NO: 7898 - DNA, 23 bp, Homo sapiens
tgtttctcctggataaatatagg

SEQ ID NO: 7899 - DNA, 23 bp, Homo sapiens
aggaatgtcagtaaatttaatgg

SEQ ID NO: 7900 - DNA, 23 bp, Homo sapiens
gcagctatatggagcacatttgg

SEQ ID NO: 7901 - DNA, 23 bp, Homo sapiens
ccagcagtgctcatttctatagg

SEQ ID NO: 7902 - DNA, 23 bp, Homo sapiens
tcatctgtatcatacctatttgg

SEQ ID NO: 7903 - DNA, 23 bp, Homo sapiens
tctcagtagaacattaaaaatgg

SEQ ID NO: 7904 - DNA, 23 bp, Homo sapiens
gaacatgactaaaatcttaaagg

SEQ ID NO: 7905 - DNA, 23 bp, Homo sapiens
tttagcttagttcttctgtttgg

SEQ ID NO: 7906 - DNA, 23 bp, Homo sapiens
aacagaagaactaagctaaatgg

SEQ ID NO: 7907 - DNA, 23 bp, Homo sapiens
actttgtgttcaaggtaaaatgg

SEQ ID NO: 7908 - DNA, 23 bp, Homo sapiens
ggagcaaaacgaccacaaatagg

SEQ ID NO: 7909 - DNA, 23 bp, Homo sapiens
aagctgaagtgctacattaatgg

SEQ ID NO: 7910 - DNA, 23 bp, Homo sapiens
agatttgctgaaggcttttaggg

SEQ ID NO: 7911 - DNA, 23 bp, Homo sapiens
ccacatcataatcagaaaatagg

SEQ ID NO: 7912 - DNA, 23 bp, Homo sapiens
tttctagataactattaaaatgg

SEQ ID NO: 7913 - DNA, 23 bp, Homo sapiens
ccatccacttgataaaataatgg

SEQ ID NO: 7914 - DNA, 23 bp, Homo sapiens
aatagtctgacactctaaattgg

SEQ ID NO: 7915 - DNA, 23 bp, Homo sapiens
tcattcatatactctataaaagg

SEQ ID NO: 7916 - DNA, 23 bp, Homo sapiens
ccttttggtcaggtgcaattagg

SEQ ID NO: 7917 - DNA, 23 bp, Homo sapiens
aataaatctgcattgaaaaatgg

SEQ ID NO: 7918 - DNA, 23 bp, Homo sapiens
tctgatgtattttatcctattgg

SEQ ID NO: 7919 - DNA, 23 bp, Homo sapiens
atagggcatacacattttaaagg

SEQ ID NO: 7920 - DNA, 23 bp, Homo sapiens
cacatcgctttattgtaaaatgg

SEQ ID NO: 7921 - DNA, 23 bp, Homo sapiens
aattaaacaaatacacaaaatgg

SEQ ID NO: 7922 - DNA, 23 bp, Homo sapiens
tgagaagcattgttactaaatgg

SEQ ID NO: 7923 - DNA, 23 bp, Homo sapiens
tagcgccctcaaatacatttagg

SEQ ID NO: 7924 - DNA, 23 bp, Homo sapiens
ttaagggattaaggagaaaatgg

SEQ ID NO: 7925 - DNA, 23 bp, Homo sapiens
ttacactctctgaatgcttttgg

SEQ ID NO: 7926 - DNA, 23 bp, Homo sapiens
tggcttccaccattgtaattagg

SEQ ID NO: 7927 - DNA, 23 bp, Homo sapiens
cattgatgtgatattctaaaagg

SEQ ID NO: 7928 - DNA, 23 bp, Homo sapiens
ccagttatccagaagattaaagg

SEQ ID NO: 7929 - DNA, 23 bp, Homo sapiens
gcatgaaagctgatgttttatgg

SEQ ID NO: 7930 - DNA, 23 bp, Homo sapiens
atgccatcttatttgttaatagg

SEQ ID NO: 7931 - DNA, 23 bp, Homo sapiens
atagagtatatgaatgaaattgg

SEQ ID NO: 7932 - DNA, 23 bp, Homo sapiens
tggaagctataccaagaaaatgg

SEQ ID NO: 7933 - DNA, 23 bp, Homo sapiens
cttgacatctttgtattaatagg

SEQ ID NO: 7934 - DNA, 23 bp, Homo sapiens
ttattgctctttaaaatatatgg

SEQ ID NO: 7935 - DNA, 23 bp, Homo sapiens
tcatgtgacataaatttaattgg

SEQ ID NO: 7936 - DNA, 23 bp, Homo sapiens
tgtgagatatgcccttttatagg

SEQ ID NO: 7937 - DNA, 23 bp, Homo sapiens
tgcggagtagttttgtttaatgg

SEQ ID NO: 7938 - DNA, 23 bp, Homo sapiens
ataaaatgaatgaagctaaatgg

SEQ ID NO: 7939 - DNA, 23 bp, Homo sapiens
gtagaaagccatttccatttagg

SEQ ID NO: 7940 - DNA, 23 bp, Homo sapiens
gcaaagatattatcatttaatgg

SEQ ID NO: 7941 - DNA, 23 bp, Homo sapiens
ttttctttgcattaactaaaagg

SEQ ID NO: 7942 - DNA, 23 bp, Homo sapiens
aggaaatcctttcaaaaaattgg

SEQ ID NO: 7943 - DNA, 23 bp, Homo sapiens
tgacaaaccatgaaataatttgg

SEQ ID NO: 7944 - DNA, 23 bp, Homo sapiens
ttatattcaaagtattttaatgg

SEQ ID NO: 7945 - DNA, 23 bp, Homo sapiens
ttaaaatgtgttcctctaattgg

SEQ ID NO: 7946 - DNA, 23 bp, Homo sapiens
gtatctttgtaatttgaaaatgg

SEQ ID NO: 7947 - DNA, 23 bp, Homo sapiens
ccaatgaaagacatttttattgg

SEQ ID NO: 7948 - DNA, 23 bp, Homo sapiens
aaaaccataagtaacccgaaagg

SEQ ID NO: 7949 - DNA, 23 bp, Homo sapiens
atcacggtcagtctagcacaggg

SEQ ID NO: 7950 - DNA, 23 bp, Homo sapiens
gagcatgctatttagccatgagg

SEQ ID NO: 7951 - DNA, 23 bp, Homo sapiens
gaaaggactactttccaacatgg

SEQ ID NO: 7952 - DNA, 23 bp, Homo sapiens
gtttgtgcctgagaaagcatagg

SEQ ID NO: 7953 - DNA, 23 bp, Homo sapiens
atctgcagagaagggtttggggg

SEQ ID NO: 7954 - DNA, 23 bp, Homo sapiens
aattcatcaggtccataccctgg

SEQ ID NO: 7955 - DNA, 23 bp, Homo sapiens
tgaccgtgatctgcagagaaggg

SEQ ID NO: 7956 - DNA, 23 bp, Homo sapiens
gaaggcacttaatatcatgttgg

SEQ ID NO: 7957 - DNA, 23 bp, Homo sapiens
actccaacatttatatgggatgg

SEQ ID NO: 7958 - DNA, 23 bp, Homo sapiens
tttcattgtgtgttacacaatgg

SEQ ID NO: 7959 - DNA, 23 bp, Homo sapiens
gaaatttttagtcctttccaggg

SEQ ID NO: 7960 - DNA, 23 bp, Homo sapiens
gatcacggtcagtctagcacagg

SEQ ID NO: 7961 - DNA, 23 bp, Homo sapiens
tgggatggtactcttcaatccgg

SEQ ID NO: 7962 - DNA, 23 bp, Homo sapiens
gtaccatcccatataaatgttgg

SEQ ID NO: 7963 - DNA, 23 bp, Homo sapiens
gggggagtggatagagaggaggg

SEQ ID NO: 7964 - DNA, 23 bp, Homo sapiens
ttctttctctcaacagtgggtgg

SEQ ID NO: 7965 - DNA, 23 bp, Homo sapiens
tgaatgtgtggagagctcttagg

SEQ ID NO: 7966 - DNA, 23 bp, Homo sapiens
gtggggttcttccatgacattgg

SEQ ID NO: 7967 - DNA, 23 bp, Homo sapiens
ataattgtatagaatttagtggg

SEQ ID NO: 7968 - DNA, 23 bp, Homo sapiens
attcatatgtaccatatcatagg

SEQ ID NO: 7969 - DNA, 23 bp, Homo sapiens
ttatggatgcctgtttttgccgg

SEQ ID NO: 7970 - DNA, 23 bp, Homo sapiens
tgatctgcagagaagggtttggg

SEQ ID NO: 7971 - DNA, 23 bp, Homo sapiens
atataaatgatattcgaaattgg

SEQ ID NO: 7972 - DNA, 23 bp, Homo sapiens
tgttctatattcctatgatatgg

SEQ ID NO: 7973 - DNA, 23 bp, Homo sapiens
cagacactgatatcacactgagg

SEQ ID NO: 7974 - DNA, 23 bp, Homo sapiens
tctcacaagtaagctcactgggg

SEQ ID NO: 7975 - DNA, 23 bp, Homo sapiens
caaaacctaagcaaaccctgggg

SEQ ID NO: 7976 - DNA, 23 bp, Homo sapiens
taattggagttattccacagggg

SEQ ID NO: 7977 - DNA, 23 bp, Homo sapiens
gaagccaagtaatagagacgggg

SEQ ID NO: 7978 - DNA, 23 bp, Homo sapiens
gcatcagtaagaaaacaaggagg

SEQ ID NO: 7979 - DNA, 23 bp, Homo sapiens
acatatgagtgtatacactgagg

SEQ ID NO: 7980 - DNA, 23 bp, Homo sapiens
gtgtgtaagagcaagcaaggagg

SEQ ID NO: 7981 - DNA, 23 bp, Homo sapiens
gtactgtgctgttaggcacgggg

SEQ ID NO: 7982 - DNA, 23 bp, Homo sapiens
tgggcactataaatatgacaagg

SEQ ID NO: 7983 - DNA, 23 bp, Homo sapiens
tataagaggagagagccatgtgg

SEQ ID NO: 7984 - DNA, 23 bp, Homo sapiens
gtggcactaacaaaaacacaagg

SEQ ID NO: 7985 - DNA, 23 bp, Homo sapiens
tcagcaacgtaatgaagacgagg

SEQ ID NO: 7986 - DNA, 23 bp, Homo sapiens
aagaaatatttacaacaacgtgg

SEQ ID NO: 7987 - DNA, 23 bp, Homo sapiens
gcataagatggaaatcctagggg

SEQ ID NO: 7988 - DNA, 23 bp, Homo sapiens
atgtagcacatacacaccagggg

SEQ ID NO: 7989 - DNA, 23 bp, Homo sapiens
atgtgtacttctaaacagtgagg

SEQ ID NO: 7990 - DNA, 23 bp, Homo sapiens
gagacagtgaaccaagcatgggg

SEQ ID NO: 7991 - DNA, 23 bp, Homo sapiens
tgagaaataagattagcccgtgg

SEQ ID NO: 7992 - DNA, 23 bp, Homo sapiens
aatttggagcctgatatgagtgg

SEQ ID NO: 7993 - DNA, 23 bp, Homo sapiens
gagcgatgccttaatgaaggtgg

SEQ ID NO: 7994 - DNA, 23 bp, Homo sapiens
atacactcaagtgacaggagagg

SEQ ID NO: 7995 - DNA, 23 bp, Homo sapiens
cacatgttactgctccaatgtgg

SEQ ID NO: 7996 - DNA, 23 bp, Homo sapiens
acggggccccctaacaaacaggg

SEQ ID NO: 7997 - DNA, 23 bp, Homo sapiens
cataggcatactatttacggagg

SEQ ID NO: 7998 - DNA, 23 bp, Homo sapiens
gtaatgatgccaatgatgagagg

SEQ ID NO: 7999 - DNA, 23 bp, Homo sapiens
atacatgtgttaaatccatgtgg

SEQ ID NO: 8000 - DNA, 23 bp, Homo sapiens
acattgccgagaatatgacctgg

SEQ ID NO: 8001 - DNA, 23 bp, Homo sapiens
aatattgctaggtatgctagggg

SEQ ID NO: 8002 - DNA, 23 bp, Homo sapiens
gattatgggaaactggaaggagg

SEQ ID NO: 8003 - DNA, 23 bp, Homo sapiens
ataggggacagtcacccacatgg

SEQ ID NO: 8004 - DNA, 23 bp, Homo sapiens
ggtgtttaagcaggtcagggcgg

SEQ ID NO: 8005 - DNA, 23 bp, Homo sapiens
gtgctgcaaatgaattgaggagg

SEQ ID NO: 8006 - DNA, 23 bp, Homo sapiens
aagtgaatatatgctatgaaggg

SEQ ID NO: 8007 - DNA, 23 bp, Homo sapiens
aattgatgagatatatactgagg

SEQ ID NO: 8008 - DNA, 23 bp, Homo sapiens
ggttgaaggacacattgtggagg

SEQ ID NO: 8009 - DNA, 23 bp, Homo sapiens
aggtgagctaagcattacacagg

SEQ ID NO: 8010 - DNA, 23 bp, Homo sapiens
gacttaagaaggtaatcttgggg

SEQ ID NO: 8011 - DNA, 23 bp, Homo sapiens
gtgagtaaaattgattgacgtgg

SEQ ID NO: 8012 - DNA, 23 bp, Homo sapiens
ccactggcattatcaaacacagg

SEQ ID NO: 8013 - DNA, 23 bp, Homo sapiens
atacatcaggttgacctgggagg

SEQ ID NO: 8014 - DNA, 23 bp, Homo sapiens
gataccagagataggtccagagg

SEQ ID NO: 8015 - DNA, 23 bp, Homo sapiens
gtagggcatatggttaggggagg

SEQ ID NO: 8016 - DNA, 23 bp, Homo sapiens
tatcacatagagtgttagagggg

SEQ ID NO: 8017 - DNA, 23 bp, Homo sapiens
actcccgtctcaaatataagggg

SEQ ID NO: 8018 - DNA, 23 bp, Homo sapiens
gatgataaaaacatattttgggg

SEQ ID NO: 8019 - DNA, 23 bp, Homo sapiens
aataaagtgataatgagaggggg

SEQ ID NO: 8020 - DNA, 23 bp, Homo sapiens
aacagaagtagggaaagaggggg

SEQ ID NO: 8021 - DNA, 23 bp, Homo sapiens
atactattttgtttactgggggg

SEQ ID NO: 8022 - DNA, 23 bp, Homo sapiens
tcttagagtgtattggacgtggg

SEQ ID NO: 8023 - DNA, 23 bp, Homo sapiens
ttacaaacaccctaaaagggggg

SEQ ID NO: 8024 - DNA, 23 bp, Homo sapiens
cctgtgtttgataatgccagtgg

SEQ ID NO: 8025 - DNA, 23 bp, Homo sapiens
gcacaaatcacaagagatggggg

SEQ ID NO: 8026 - DNA, 23 bp, Homo sapiens
aatgtagcacatacacaccaggg

SEQ ID NO: 8027 - DNA, 23 bp, Homo sapiens
tgactgtgagagaatgagggagg

SEQ ID NO: 8028 - DNA, 23 bp, Homo sapiens
agggagagaaatccctatggggg

SEQ ID NO: 8029 - DNA, 23 bp, Homo sapiens
taggtccagaggtattgctgtgg

SEQ ID NO: 8030 - DNA, 23 bp, Homo sapiens
acatgaatagaataattcagagg

SEQ ID NO: 8031 - DNA, 23 bp, Homo sapiens
acttatgcatgggattggggagg

SEQ ID NO: 8032 - DNA, 23 bp, Homo sapiens
gcatgagggaagacagcaggagg

SEQ ID NO: 8033 - DNA, 23 bp, Homo sapiens
aaatattgcaagcaagcacgggg

SEQ ID NO: 8034 - DNA, 23 bp, Homo sapiens
aagacacagaatagtcagagagg

SEQ ID NO: 8035 - DNA, 23 bp, Homo sapiens
atagtgggaagcttgattggtgg

SEQ ID NO: 8036 - DNA, 23 bp, Homo sapiens
tgtgtgacacgataaattggagg

SEQ ID NO: 8037 - DNA, 23 bp, Homo sapiens
aataagtcattattactcagtgg

SEQ ID NO: 8038 - DNA, 23 bp, Homo sapiens
gtatcatacgtacacatatgggg

SEQ ID NO: 8039 - DNA, 23 bp, Homo sapiens
tctatatgaggaagactcagtgg

SEQ ID NO: 8040 - DNA, 23 bp, Homo sapiens
atatatagcagttactacagtgg

SEQ ID NO: 8041 - DNA, 23 bp, Homo sapiens
aaacaaaccagctcttcacgagg

SEQ ID NO: 8042 - DNA, 23 bp, Homo sapiens
ctatgtactttgcttcagggagg

SEQ ID NO: 8043 - DNA, 23 bp, Homo sapiens
gttataagccacaggcagagagg

SEQ ID NO: 8044 - DNA, 23 bp, Homo sapiens
gcattcgggaaactttaagtcgg

SEQ ID NO: 8045 - DNA, 23 bp, Homo sapiens
gctgccagaattctatagcaggg

SEQ ID NO: 8046 - DNA, 23 bp, Homo sapiens
gcaatgttggatattcaaagagg

SEQ ID NO: 8047 - DNA, 23 bp, Homo sapiens
atttggtaatatttacacaaagg

SEQ ID NO: 8048 - DNA, 23 bp, Homo sapiens
caataaagtgataatgagagggg

SEQ ID NO: 8049 - DNA, 23 bp, Homo sapiens
tctagtgcataaagaacctgagg

SEQ ID NO: 8050 - DNA, 23 bp, Homo sapiens
cttacaaacaccctaaaaggggg

SEQ ID NO: 8051 - DNA, 23 bp, Homo sapiens
gctataatttatggtcccagagg

SEQ ID NO: 8052 - DNA, 23 bp, Homo sapiens
cttactctactcagtgcctgagg

SEQ ID NO: 8053 - DNA, 23 bp, Homo sapiens
tatcaaagtcagcattaaggggg

SEQ ID NO: 8054 - DNA, 23 bp, Homo sapiens
agagcaggtacagcctgtagggg

SEQ ID NO: 8055 - DNA, 23 bp, Homo sapiens
caatatttttgacagtacagagg

SEQ ID NO: 8056 - DNA, 23 bp, Homo sapiens
agaaagtaattggcaaacagagg

SEQ ID NO: 8057 - DNA, 23 bp, Homo sapiens
ttaagtccttcgagatgacaagg

SEQ ID NO: 8058 - DNA, 23 bp, Homo sapiens
aacactctatgtgatagtggagg

SEQ ID NO: 8059 - DNA, 23 bp, Homo sapiens
agaacaacagaagctgtttgggg

SEQ ID NO: 8060 - DNA, 23 bp, Homo sapiens
gtaactcttctattacgatgagg

SEQ ID NO: 8061 - DNA, 23 bp, Homo sapiens
atatatactcagctacaagtggg

SEQ ID NO: 8062 - DNA, 23 bp, Homo sapiens
attgccttactgttagacaaggg

SEQ ID NO: 8063 - DNA, 23 bp, Homo sapiens
tcaaagatctctaaagatggggg

SEQ ID NO: 8064 - DNA, 23 bp, Homo sapiens
cttgaacagagctttttacgagg

SEQ ID NO: 8065 - DNA, 23 bp, Homo sapiens
actatgccttgtcatctcgaagg

SEQ ID NO: 8066 - DNA, 23 bp, Homo sapiens
agagacagcaaacaatgttgagg

SEQ ID NO: 8067 - DNA, 23 bp, Homo sapiens
gtacatagcagtatcccacttgg

SEQ ID NO: 8068 - DNA, 23 bp, Homo sapiens
atcatgctgcataaaaccagtgg

SEQ ID NO: 8069 - DNA, 23 bp, Homo sapiens
atactcagctacaagtgggtcgg

SEQ ID NO: 8070 - DNA, 23 bp, Homo sapiens
gtatacttgtgtgctgtgagagg

SEQ ID NO: 8071 - DNA, 23 bp, Homo sapiens
agtaaactagccaaggatggagg

SEQ ID NO: 8072 - DNA, 23 bp, Homo sapiens
ttgctcttacacatttttggggg

SEQ ID NO: 8073 - DNA, 23 bp, Homo sapiens
gagggacaagttgtgccaggagg

SEQ ID NO: 8074 - DNA, 23 bp, Homo sapiens
tcaaacgacagtaaaagtgaagg

SEQ ID NO: 8075 - DNA, 23 bp, Homo sapiens
catgcacgtgttttccatagggg

SEQ ID NO: 8076 - DNA, 23 bp, Homo sapiens
ggatatctatccttgccttgagg

SEQ ID NO: 8077 - DNA, 23 bp, Homo sapiens
ataaaagaatgagtaatacaagg

SEQ ID NO: 8078 - DNA, 23 bp, Homo sapiens
ataattggagttattccacaggg

SEQ ID NO: 8079 - DNA, 23 bp, Homo sapiens
aattttgatgatacactctgtgg

SEQ ID NO: 8080 - DNA, 23 bp, Homo sapiens
gctcttaaaagtagatgtagggg

SEQ ID NO: 8081 - DNA, 23 bp, Homo sapiens
gagtttccaagatctgctgaggg

SEQ ID NO: 8082 - DNA, 23 bp, Homo sapiens
aatacatcatttattccactagg

SEQ ID NO: 8083 - DNA, 23 bp, Homo sapiens
gtagaagtagaagaatccacggg

SEQ ID NO: 8084 - DNA, 23 bp, Homo sapiens
atcctgttggctgaaagcagtgg

SEQ ID NO: 8085 - DNA, 23 bp, Homo sapiens
tgtattatcttactacaactagg

SEQ ID NO: 8086 - DNA, 23 bp, Homo sapiens
atgttggatattcaaagaggagg

SEQ ID NO: 8087 - DNA, 23 bp, Homo sapiens
gcacattgtatgttatacacagg

SEQ ID NO: 8088 - DNA, 23 bp, Homo sapiens
tatacttgtgtgctgtgagaggg

SEQ ID NO: 8089 - DNA, 23 bp, Homo sapiens
taatggttataaaaaacatgagg

SEQ ID NO: 8090 - DNA, 23 bp, Homo sapiens
ctaaatgcagacacacctagtgg

SEQ ID NO: 8091 - DNA, 23 bp, Homo sapiens
ttcgagatgacaaggcatagtgg

SEQ ID NO: 8092 - DNA, 23 bp, Homo sapiens
tagtagatttgagacccacatgg

SEQ ID NO: 8093 - DNA, 23 bp, Homo sapiens
gcattaagcaacaccaacaaggg

SEQ ID NO: 8094 - DNA, 23 bp, Homo sapiens
atgataaaataagtatcaggcgg

SEQ ID NO: 8095 - DNA, 23 bp, Homo sapiens
ataagaggagagagccatgtggg

SEQ ID NO: 8096 - DNA, 23 bp, Homo sapiens
aggttctttatgcactagagagg

SEQ ID NO: 8097 - DNA, 23 bp, Homo sapiens
tcagtgctatctttacagcatgg

SEQ ID NO: 8098 - DNA, 23 bp, Homo sapiens
agctcttctagattactggaagg

SEQ ID NO: 8099 - DNA, 23 bp, Homo sapiens
aatttagtgatatatgtgaaagg

SEQ ID NO: 8100 - DNA, 23 bp, Homo sapiens
ctaacattactaattactgaagg

SEQ ID NO: 8101 - DNA, 23 bp, Homo sapiens
tacaatacaatcgcaaactgggg

SEQ ID NO: 8102 - DNA, 23 bp, Homo sapiens
agaggctggagcgctctgcgtgg

SEQ ID NO: 8103 - DNA, 23 bp, Homo sapiens
tatatttgagacgggagtggggg

SEQ ID NO: 8104 - DNA, 23 bp, Homo sapiens
ttacggacaatgattaacactgg

SEQ ID NO: 8105 - DNA, 23 bp, Homo sapiens
agattgatgataatcttgagtgg

SEQ ID NO: 8106 - DNA, 23 bp, Homo sapiens
tacatgtgttaaatccatgtggg

SEQ ID NO: 8107 - DNA, 23 bp, Homo sapiens
gctcaagagggactttgctgagg

SEQ ID NO: 8108 - DNA, 23 bp, Homo sapiens
ggtttaaagaggccagtaggtgg

SEQ ID NO: 8109 - DNA, 23 bp, Homo sapiens
taccagatatgctatgctagagg

SEQ ID NO: 8110 - DNA, 23 bp, Homo sapiens
ggaaaatgagtaattagcagagg

SEQ ID NO: 8111 - DNA, 23 bp, Homo sapiens
catcactcgttctcccacacagg

SEQ ID NO: 8112 - DNA, 23 bp, Homo sapiens
gccttataaatgttacagcgtgg

SEQ ID NO: 8113 - DNA, 23 bp, Homo sapiens
tgagttcgaaaagttatggaggg

SEQ ID NO: 8114 - DNA, 23 bp, Homo sapiens
aatctaccagattttcaacatgg

SEQ ID NO: 8115 - DNA, 23 bp, Homo sapiens
ttacattgacatgcttaaggggg

SEQ ID NO: 8116 - DNA, 23 bp, Homo sapiens
agtatgtaactaactcaagtggg

SEQ ID NO: 8117 - DNA, 23 bp, Homo sapiens
gttatagtccaaaaacctagagg

SEQ ID NO: 8118 - DNA, 23 bp, Homo sapiens
aagcagatgatgatgccctatgg

SEQ ID NO: 8119 - DNA, 23 bp, Homo sapiens
tgaaaattgatgtatgcatgagg

SEQ ID NO: 8120 - DNA, 23 bp, Homo sapiens
agaacattatataagtacctagg

SEQ ID NO: 8121 - DNA, 23 bp, Homo sapiens
gtgatagaatcgcattgcagggg

SEQ ID NO: 8122 - DNA, 23 bp, Homo sapiens
tgagaggtgatgtagcatctcgg

SEQ ID NO: 8123 - DNA, 23 bp, Homo sapiens
aaaatgctaggactgtccactgg

SEQ ID NO: 8124 - DNA, 23 bp, Homo sapiens
cttaacatgttccaaccagaagg

SEQ ID NO: 8125 - DNA, 23 bp, Homo sapiens
cccgccttcctacaatgcaaggg

SEQ ID NO: 8126 - DNA, 23 bp, Homo sapiens
agagtcgatggagagtcaagagg

SEQ ID NO: 8127 - DNA, 23 bp, Homo sapiens
cttttttgtaataactcaagggg

SEQ ID NO: 8128 - DNA, 23 bp, Homo sapiens
gaaaaagtcacactgaaaccagg

SEQ ID NO: 8129 - DNA, 23 bp, Homo sapiens
catatgagtgtatacactgaggg

SEQ ID NO: 8130 - DNA, 23 bp, Homo sapiens
gaataccagaaagacagcaatgg

SEQ ID NO: 8131 - DNA, 23 bp, Homo sapiens
atggactacggtcattctagagg

SEQ ID NO: 8132 - DNA, 23 bp, Homo sapiens
atattgcctcaatatttcaaggg

SEQ ID NO: 8133 - DNA, 23 bp, Homo sapiens
acttgaatagtgatcaccatagg

SEQ ID NO: 8134 - DNA, 23 bp, Homo sapiens
atctgtagggaactagaggtggg

SEQ ID NO: 8135 - DNA, 23 bp, Homo sapiens
attgttatatacagcaatggagg

SEQ ID NO: 8136 - DNA, 23 bp, Homo sapiens
gctgatggcatcgaatgcattgg

SEQ ID NO: 8137 - DNA, 23 bp, Homo sapiens
tatatatgtacttagaacaaagg

SEQ ID NO: 8138 - DNA, 23 bp, Homo sapiens
gtaagaacaaagaaatcactagg

SEQ ID NO: 8139 - DNA, 23 bp, Homo sapiens
cgaaagttcttaaagtctagggg

SEQ ID NO: 8140 - DNA, 23 bp, Homo sapiens
gcacataagtgtcacagagtagg

SEQ ID NO: 8141 - DNA, 23 bp, Homo sapiens
acaatgctttccaaatcaccagg

SEQ ID NO: 8142 - DNA, 23 bp, Homo sapiens
tgaataatgcagagatgcgaagg

SEQ ID NO: 8143 - DNA, 23 bp, Homo sapiens
acagtgctgcaaatgaattgagg

SEQ ID NO: 8144 - DNA, 23 bp, Homo sapiens
gcagtttatgcatcctacaatgg

SEQ ID NO: 8145 - DNA, 23 bp, Homo sapiens
agacaaagcaaggttttgtgagg

SEQ ID NO: 8146 - DNA, 23 bp, Homo sapiens
atacagttagcttattctggagg

SEQ ID NO: 8147 - DNA, 23 bp, Homo sapiens
taaactactaagtttgcaggagg

SEQ ID NO: 8148 - DNA, 23 bp, Homo sapiens
atgcagatgatctagaaatgagg

SEQ ID NO: 8149 - DNA, 23 bp, Homo sapiens
acaatatgtggacagtctgaggg

SEQ ID NO: 8150 - DNA, 23 bp, Homo sapiens
tgttagcaagaaacaccataggg

SEQ ID NO: 8151 - DNA, 23 bp, Homo sapiens
ccaatgagaatcaattggagggg

SEQ ID NO: 8152 - DNA, 23 bp, Homo sapiens
gacttttattactttccttgagg

SEQ ID NO: 8153 - DNA, 23 bp, Homo sapiens
ttcctaagagaattagaccaagg

SEQ ID NO: 8154 - DNA, 23 bp, Homo sapiens
atataaggggcgtagcctgaggg

SEQ ID NO: 8155 - DNA, 23 bp, Homo sapiens
agtctttatgatccatccagtgg

SEQ ID NO: 8156 - DNA, 23 bp, Homo sapiens
attatctaagatcaacactcagg

SEQ ID NO: 8157 - DNA, 23 bp, Homo sapiens
ctctgactgtgagagaatgaggg

SEQ ID NO: 8158 - DNA, 23 bp, Homo sapiens
aatatgcagcaaatattactggg

SEQ ID NO: 8159 - DNA, 23 bp, Homo sapiens
tcttacaaacaccctaaaagggg

SEQ ID NO: 8160 - DNA, 23 bp, Homo sapiens
ttaacacagtatattaactgtgg

SEQ ID NO: 8161 - DNA, 23 bp, Homo sapiens
gtaattggcaaacagaggatggg

SEQ ID NO: 8162 - DNA, 23 bp, Homo sapiens
gctgcttcttcatgataggaggg

SEQ ID NO: 8163 - DNA, 23 bp, Homo sapiens
cctttctcataaaatcaagaagg

SEQ ID NO: 8164 - DNA, 23 bp, Homo sapiens
ctgaagccaagtaatagagacgg

SEQ ID NO: 8165 - DNA, 23 bp, Homo sapiens
aattaagcctctgaagtctgtgg

SEQ ID NO: 8166 - DNA, 23 bp, Homo sapiens
tactgcatctagcctacatgtgg

SEQ ID NO: 8167 - DNA, 23 bp, Homo sapiens
aaaaacagttgattaaacaatgg

SEQ ID NO: 8168 - DNA, 23 bp, Homo sapiens
ctaactcagagctattaggaggg

SEQ ID NO: 8169 - DNA, 23 bp, Homo sapiens
gcttggacatgcaatagagtggg

SEQ ID NO: 8170 - DNA, 23 bp, Homo sapiens
ttacatttagctgtaaacaaggg

SEQ ID NO: 8171 - DNA, 23 bp, Homo sapiens
agtcttggtgatttcaacggagg

SEQ ID NO: 8172 - DNA, 23 bp, Homo sapiens
tttatcatataaagaccttgagg

SEQ ID NO: 8173 - DNA, 23 bp, Homo sapiens
agaatgaaaatactttaggtggg

SEQ ID NO: 8174 - DNA, 23 bp, Homo sapiens
ttactattttaaatacatcaggg

SEQ ID NO: 8175 - DNA, 23 bp, Homo sapiens
cattcgatgccatcagcacaggg

SEQ ID NO: 8176 - DNA, 23 bp, Homo sapiens
tgagaaaaatgtttcatcagtgg

SEQ ID NO: 8177 - DNA, 23 bp, Homo sapiens
aacgctaataaataagagagagg

SEQ ID NO: 8178 - DNA, 23 bp, Homo sapiens
gcaactggtgtatgttaaggagg

SEQ ID NO: 8179 - DNA, 23 bp, Homo sapiens
ttggcttagcaggtagcagaagg

SEQ ID NO: 8180 - DNA, 23 bp, Homo sapiens
ggtttttgtgcaagccaagtggg

SEQ ID NO: 8181 - DNA, 23 bp, Homo sapiens
gcgatgtcttcaaggaacatagg

SEQ ID NO: 8182 - DNA, 23 bp, Homo sapiens
gttaaaaacgtatggcatgaggg

SEQ ID NO: 8183 - DNA, 23 bp, Homo sapiens
cagggattaaaattaggcatggg

SEQ ID NO: 8184 - DNA, 23 bp, Homo sapiens
gccaattcgaaacgtgctagagg

SEQ ID NO: 8185 - DNA, 23 bp, Homo sapiens
aacacttcttatatatgcagagg

SEQ ID NO: 8186 - DNA, 23 bp, Homo sapiens
gtaaagatagcactgatacatgg

SEQ ID NO: 8187 - DNA, 23 bp, Homo sapiens
tctgaagttgacatattttgggg

SEQ ID NO: 8188 - DNA, 23 bp, Homo sapiens
atggtagctgattccactagagg

SEQ ID NO: 8189 - DNA, 23 bp, Homo sapiens
catataaagtacattccccaggg

SEQ ID NO: 8190 - DNA, 23 bp, Homo sapiens
attacaaactctatggactacgg

SEQ ID NO: 8191 - DNA, 23 bp, Homo sapiens
cgaacttcatcatatcaaagagg

SEQ ID NO: 8192 - DNA, 23 bp, Homo sapiens
gagaaatcatgtttttgacaggg

SEQ ID NO: 8193 - DNA, 23 bp, Homo sapiens
actgaaaaccaaatttgcaaagg

SEQ ID NO: 8194 - DNA, 23 bp, Homo sapiens
ctttgcaagtaaactagccaagg

SEQ ID NO: 8195 - DNA, 23 bp, Homo sapiens
tacaccaagcaaagatatagggg

SEQ ID NO: 8196 - DNA, 23 bp, Homo sapiens
cttagtcatagtccactggatgg

SEQ ID NO: 8197 - DNA, 23 bp, Homo sapiens
attcagcttcataagtcccaggg

SEQ ID NO: 8198 - DNA, 23 bp, Homo sapiens
actttccttgaggcagagggtgg

SEQ ID NO: 8199 - DNA, 23 bp, Homo sapiens
tcactatacttcagttctggtgg

SEQ ID NO: 8200 - DNA, 23 bp, Homo sapiens
ttaattttgtccatataacaagg

SEQ ID NO: 8201 - DNA, 23 bp, Homo sapiens
aggggttagaacaacttccatgg

SEQ ID NO: 8202 - DNA, 23 bp, Homo sapiens
aaacagaagtagggaaagagggg

SEQ ID NO: 8203 - DNA, 23 bp, Homo sapiens
gcaatttctgaaggtcttagggg

SEQ ID NO: 8204 - DNA, 23 bp, Homo sapiens
tcctgagaacatgctcaagaggg

SEQ ID NO: 8205 - DNA, 23 bp, Homo sapiens
cataatagtgtcatatgtgaagg

SEQ ID NO: 8206 - DNA, 23 bp, Homo sapiens
ttctcagcctctacactcagcgg

SEQ ID NO: 8207 - DNA, 23 bp, Homo sapiens
acccttgcattgtaggaaggcgg

SEQ ID NO: 8208 - DNA, 23 bp, Homo sapiens
gatcgatctatctatctgtaggg

SEQ ID NO: 8209 - DNA, 23 bp, Homo sapiens
ctgaatagttgatggccacaggg

SEQ ID NO: 8210 - DNA, 23 bp, Homo sapiens
cagcaagcaaagacaaagcaagg

SEQ ID NO: 8211 - DNA, 23 bp, Homo sapiens
tctaagatcaacactcaggaagg

SEQ ID NO: 8212 - DNA, 23 bp, Homo sapiens
ttaaaattccaaatagaacaagg

SEQ ID NO: 8213 - DNA, 23 bp, Homo sapiens
ctatcaaagtcagcattaagggg

SEQ ID NO: 8214 - DNA, 23 bp, Homo sapiens
gtagagcaggtacagcctgtagg

SEQ ID NO: 8215 - DNA, 23 bp, Homo sapiens
agagtttccaagatctgctgagg

SEQ ID NO: 8216 - DNA, 23 bp, Homo sapiens
agcttggacatgcaatagagtgg

SEQ ID NO: 8217 - DNA, 23 bp, Homo sapiens
tcatgaatctctgtcagccaagg

SEQ ID NO: 8218 - DNA, 23 bp, Homo sapiens
ttattgccaaagttgtaaggagg

SEQ ID NO: 8219 - DNA, 23 bp, Homo sapiens
acttttttgtaataactcaaggg

SEQ ID NO: 8220 - DNA, 23 bp, Homo sapiens
attgaatacagattgaagccagg

SEQ ID NO: 8221 - DNA, 23 bp, Homo sapiens
gagaaaggcttcctctggagagg

SEQ ID NO: 8222 - DNA, 23 bp, Homo sapiens
ttgatgatacactctgtggtagg

SEQ ID NO: 8223 - DNA, 23 bp, Homo sapiens
ttgacactttcaactcagcatgg

SEQ ID NO: 8224 - DNA, 23 bp, Homo sapiens
ttggtcacagaaatttctaaggg

SEQ ID NO: 8225 - DNA, 23 bp, Homo sapiens
cttcttaactggagcatcggagg

SEQ ID NO: 8226 - DNA, 23 bp, Homo sapiens
acatgattagttatcaggatggg

SEQ ID NO: 8227 - DNA, 23 bp, Homo sapiens
agagacagtgaaccaagcatggg

SEQ ID NO: 8228 - DNA, 23 bp, Homo sapiens
acttcaaaggaactcaagacagg

SEQ ID NO: 8229 - DNA, 23 bp, Homo sapiens
ctatcacatagagtgttagaggg

SEQ ID NO: 8230 - DNA, 23 bp, Homo sapiens
acttcaacaaaacagaagtaggg

SEQ ID NO: 8231 - DNA, 23 bp, Homo sapiens
aattctcctaaatcaatggaagg

SEQ ID NO: 8232 - DNA, 23 bp, Homo sapiens
caatgagaatcaattggaggggg

SEQ ID NO: 8233 - DNA, 23 bp, Homo sapiens
tttgtaaaggacaagaatagggg

SEQ ID NO: 8234 - DNA, 23 bp, Homo sapiens
agatgactttgattgatagaggg

SEQ ID NO: 8235 - DNA, 23 bp, Homo sapiens
ataaaagtcctctatcctgttgg

SEQ ID NO: 8236 - DNA, 23 bp, Homo sapiens
ttataagccacaggcagagaggg

SEQ ID NO: 8237 - DNA, 23 bp, Homo sapiens
atttagcctttatttccagaagg

SEQ ID NO: 8238 - DNA, 23 bp, Homo sapiens
ggatttgctacacataaaagagg

SEQ ID NO: 8239 - DNA, 23 bp, Homo sapiens
gcaagtaaactagccaaggatgg

SEQ ID NO: 8240 - DNA, 23 bp, Homo sapiens
atacatcaattttcaaatagcgg

SEQ ID NO: 8241 - DNA, 23 bp, Homo sapiens
atatagatgacagtttatgttgg

SEQ ID NO: 8242 - DNA, 23 bp, Homo sapiens
acaaaaccctgtttgttaggggg

SEQ ID NO: 8243 - DNA, 23 bp, Homo sapiens
agttttatcagagagcaagatgg

SEQ ID NO: 8244 - DNA, 23 bp, Homo sapiens
gtcttggtgatttcaacggaggg

SEQ ID NO: 8245 - DNA, 23 bp, Homo sapiens
tataacgtgaacgccttgagagg

SEQ ID NO: 8246 - DNA, 23 bp, Homo sapiens
caacaagaaagttaaggcaaagg

SEQ ID NO: 8247 - DNA, 23 bp, Homo sapiens
ctaacccttgcattgtaggaagg

SEQ ID NO: 8248 - DNA, 23 bp, Homo sapiens
acgttatccacagacttcagagg

SEQ ID NO: 8249 - DNA, 23 bp, Homo sapiens
gttttgaacagaaaaccctcagg

SEQ ID NO: 8250 - DNA, 23 bp, Homo sapiens
gttcagtgatgaaagtaaggagg

SEQ ID NO: 8251 - DNA, 23 bp, Homo sapiens
tatttgtttaaaaattaagacgg

SEQ ID NO: 8252 - DNA, 23 bp, Homo sapiens
agtgatagaatcgcattgcaggg

SEQ ID NO: 8253 - DNA, 23 bp, Homo sapiens
tgctaagtaaaaagttagaaggg

SEQ ID NO: 8254 - DNA, 23 bp, Homo sapiens
tccagcaatcctgtgttgggagg

SEQ ID NO: 8255 - DNA, 23 bp, Homo sapiens
aattacatcttctcaaccagtgg

SEQ ID NO: 8256 - DNA, 23 bp, Homo sapiens
gtcaaattttctcttcacaaagg

SEQ ID NO: 8257 - DNA, 23 bp, Homo sapiens
ttattcagtaggcaagagaaggg

SEQ ID NO: 8258 - DNA, 23 bp, Homo sapiens
gggcagtgagatttcagagatgg

SEQ ID NO: 8259 - DNA, 23 bp, Homo sapiens
ttatgctcttatgtataagaggg

SEQ ID NO: 8260 - DNA, 23 bp, Homo sapiens
ggaggaaaatacagagactacgg

SEQ ID NO: 8261 - DNA, 23 bp, Homo sapiens
cttggtttaaagaggccagtagg

SEQ ID NO: 8262 - DNA, 23 bp, Homo sapiens
tttccttagaatcttttactcgg

SEQ ID NO: 8263 - DNA, 23 bp, Homo sapiens
tttaataagaacaatttcagtgg

SEQ ID NO: 8264 - DNA, 23 bp, Homo sapiens
ataagggagagaaatccctatgg

SEQ ID NO: 8265 - DNA, 23 bp, Homo sapiens
caggcaaccagaaaataagaagg

SEQ ID NO: 8266 - DNA, 23 bp, Homo sapiens
gcgtgggaatgaaatgtgctagg

SEQ ID NO: 8267 - DNA, 23 bp, Homo sapiens
agaatttcattgccattttgggg

SEQ ID NO: 8268 - DNA, 23 bp, Homo sapiens
gcgttcacgttataagccacagg

SEQ ID NO: 8269 - DNA, 23 bp, Homo sapiens
gccctgacctgcttaaacaccgg

SEQ ID NO: 8270 - DNA, 23 bp, Homo sapiens
ataaccctatgcttaagagatgg

SEQ ID NO: 8271 - DNA, 23 bp, Homo sapiens
gtacacattttttagccgatagg

SEQ ID NO: 8272 - DNA, 23 bp, Homo sapiens
acatcgctcattaaaaaaggtgg

SEQ ID NO: 8273 - DNA, 23 bp, Homo sapiens
atcaaagtcatctttagcatagg

SEQ ID NO: 8274 - DNA, 23 bp, Homo sapiens
ccttataaatgttacagcgtggg

SEQ ID NO: 8275 - DNA, 23 bp, Homo sapiens
tgctccttaatcttaggaggtgg

SEQ ID NO: 8276 - DNA, 23 bp, Homo sapiens
tagttatgaggatgagactaggg

SEQ ID NO: 8277 - DNA, 23 bp, Homo sapiens
aatgtgctatataaaatatgtgg

SEQ ID NO: 8278 - DNA, 23 bp, Homo sapiens
gtggaaggagagttgatgggggg

SEQ ID NO: 8279 - DNA, 23 bp, Homo sapiens
ccttgcattgtaggaaggcgggg

SEQ ID NO: 8280 - DNA, 23 bp, Homo sapiens
taagaaggtaaaatacaggcagg

SEQ ID NO: 8281 - DNA, 23 bp, Homo sapiens
gatacttttaatctaaggagtgg

SEQ ID NO: 8282 - DNA, 23 bp, Homo sapiens
ccacaaagttgataggcataggg

SEQ ID NO: 8283 - DNA, 23 bp, Homo sapiens
agtagaagtagaagaatccacgg

SEQ ID NO: 8284 - DNA, 23 bp, Homo sapiens
ggcattgaagagaattaagtagg

SEQ ID NO: 8285 - DNA, 23 bp, Homo sapiens
aatacaatattaatttggtgtgg

SEQ ID NO: 8286 - DNA, 23 bp, Homo sapiens
ccattcttctagttttatggagg

SEQ ID NO: 8287 - DNA, 23 bp, Homo sapiens
ccttcattaaggcatcgctcagg

SEQ ID NO: 8288 - DNA, 23 bp, Homo sapiens
gcaggtgatatcgctaaagatgg

SEQ ID NO: 8289 - DNA, 23 bp, Homo sapiens
cctgagcgatgccttaatgaagg

SEQ ID NO: 8290 - DNA, 23 bp, Homo sapiens
ggaggatgcaggtaggggaaggg

SEQ ID NO: 8291 - DNA, 23 bp, Homo sapiens
gagctcattgatgtcatccaagg

SEQ ID NO: 8292 - DNA, 23 bp, Homo sapiens
tggtgagaacttttaagcgaagg

SEQ ID NO: 8293 - DNA, 23 bp, Homo sapiens
ctctgtcagccaaggaatgtcgg

SEQ ID NO: 8294 - DNA, 23 bp, Homo sapiens
accagtatcctgatatatgttgg

SEQ ID NO: 8295 - DNA, 23 bp, Homo sapiens
acagcaatggaggtagggcaggg

SEQ ID NO: 8296 - DNA, 23 bp, Homo sapiens
cttcattataacatgtcccaagg

SEQ ID NO: 8297 - DNA, 23 bp, Homo sapiens
ttcctttaatgccattgcagagg

SEQ ID NO: 8298 - DNA, 23 bp, Homo sapiens
ccaaatttctgaaagatccaagg

SEQ ID NO: 8299 - DNA, 23 bp, Homo sapiens
agcaatcaggacttatgcatggg

SEQ ID NO: 8300 - DNA, 23 bp, Homo sapiens
tatcatataaagaccttgagggg

SEQ ID NO: 8301 - DNA, 23 bp, Homo sapiens
aagtacaatcaaatttgaagagg

SEQ ID NO: 8302 - DNA, 23 bp, Homo sapiens
ttaaaatatactaagcatgtagg

SEQ ID NO: 8303 - DNA, 23 bp, Homo sapiens
ctattacttggcttcagatgggg

SEQ ID NO: 8304 - DNA, 23 bp, Homo sapiens
tatctgtagggaactagaggtgg

SEQ ID NO: 8305 - DNA, 23 bp, Homo sapiens
gtaatgcattactcaatggcagg

SEQ ID NO: 8306 - DNA, 23 bp, Homo sapiens
tattgccaaagttgtaaggaggg

SEQ ID NO: 8307 - DNA, 23 bp, Homo sapiens
attaccatctctttcaggagtgg

SEQ ID NO: 8308 - DNA, 23 bp, Homo sapiens
atatttacatacctctgcaatgg

SEQ ID NO: 8309 - DNA, 23 bp, Homo sapiens
gtaagaaaacaaggaggtagggg

SEQ ID NO: 8310 - DNA, 23 bp, Homo sapiens
gcagcctgagagatgtgcgcagg

SEQ ID NO: 8311 - DNA, 23 bp, Homo sapiens
cagtatgccttctttaggaaggg

SEQ ID NO: 8312 - DNA, 23 bp, Homo sapiens
tacgccccttatatttgagacgg

SEQ ID NO: 8313 - DNA, 23 bp, Homo sapiens
tagtgtgttaggtttatcagtgg

SEQ ID NO: 8314 - DNA, 23 bp, Homo sapiens
aagagggtaagtgcactgaaagg

SEQ ID NO: 8315 - DNA, 23 bp, Homo sapiens
taagggagagaaatccctatggg

SEQ ID NO: 8316 - DNA, 23 bp, Homo sapiens
atatctggtagcagaattggagg

SEQ ID NO: 8317 - DNA, 23 bp, Homo sapiens
cagaaggcgcagagttcgaatgg

SEQ ID NO: 8318 - DNA, 23 bp, Homo sapiens
ttaccatgataacccaattgtgg

SEQ ID NO: 8319 - DNA, 23 bp, Homo sapiens
cattactaattactgaaggatgg

SEQ ID NO: 8320 - DNA, 23 bp, Homo sapiens
ctgagaaaatttgcagcacaggg

SEQ ID NO: 8321 - DNA, 23 bp, Homo sapiens
tataacactggactaagcattgg

SEQ ID NO: 8322 - DNA, 23 bp, Homo sapiens
cccaatgagaatcaattggaggg

SEQ ID NO: 8323 - DNA, 23 bp, Homo sapiens
atgtgggtgactgtcccctatgg

SEQ ID NO: 8324 - DNA, 23 bp, Homo sapiens
aattgagtctagagagtcgatgg

SEQ ID NO: 8325 - DNA, 23 bp, Homo sapiens
aatgatagacctgatcctatcgg

SEQ ID NO: 8326 - DNA, 23 bp, Homo sapiens
agagttcaaggtttgctcaaggg

SEQ ID NO: 8327 - DNA, 23 bp, Homo sapiens
acgccccttatatttgagacggg

SEQ ID NO: 8328 - DNA, 23 bp, Homo sapiens
aagcaaggttttgtgaggcaagg

SEQ ID NO: 8329 - DNA, 23 bp, Homo sapiens
tatgtaacttcgaaaagtgtagg

SEQ ID NO: 8330 - DNA, 23 bp, Homo sapiens
atctatctgtagggaactagagg

SEQ ID NO: 8331 - DNA, 23 bp, Homo sapiens
gtatgctccttaatcttaggagg

SEQ ID NO: 8332 - DNA, 23 bp, Homo sapiens
gcagggattaaaattaggcatgg

SEQ ID NO: 8333 - DNA, 23 bp, Homo sapiens
tgtgctaccagaataggcattgg

SEQ ID NO: 8334 - DNA, 23 bp, Homo sapiens
gagtcaatttttgcgaaccaagg

SEQ ID NO: 8335 - DNA, 23 bp, Homo sapiens
tgatttattgatatttacacagg

SEQ ID NO: 8336 - DNA, 23 bp, Homo sapiens
cagcaatcctgtgttgggagggg

SEQ ID NO: 8337 - DNA, 23 bp, Homo sapiens
ggaaagtttaatcaattctgagg

SEQ ID NO: 8338 - DNA, 23 bp, Homo sapiens
tgtcttcttaactggagcatcgg

SEQ ID NO: 8339 - DNA, 23 bp, Homo sapiens
cttttcgaactcatacagaccgg

SEQ ID NO: 8340 - DNA, 23 bp, Homo sapiens
tctgagggacaagttgtgccagg

SEQ ID NO: 8341 - DNA, 23 bp, Homo sapiens
cggtttttgtgcaagccaagtgg

SEQ ID NO: 8342 - DNA, 23 bp, Homo sapiens
ggagaaaggtaaaaaaatcaggg

SEQ ID NO: 8343 - DNA, 23 bp, Homo sapiens
cagtggcccttgaaatattgagg

SEQ ID NO: 8344 - DNA, 23 bp, Homo sapiens
ctacccattagttcccccatagg

SEQ ID NO: 8345 - DNA, 23 bp, Homo sapiens
tcagtatatgagattgctgtagg

SEQ ID NO: 8346 - DNA, 23 bp, Homo sapiens
gatgaatgggatccaagaatcgg

SEQ ID NO: 8347 - DNA, 23 bp, Homo sapiens
atgtggtatatccttcataaggg

SEQ ID NO: 8348 - DNA, 23 bp, Homo sapiens
ttaagtcttggtgatttcaacgg

SEQ ID NO: 8349 - DNA, 23 bp, Homo sapiens
tgaaattaatgtgtgttcagtgg

SEQ ID NO: 8350 - DNA, 23 bp, Homo sapiens
gccatcagagagtagaagaaagg

SEQ ID NO: 8351 - DNA, 23 bp, Homo sapiens
tcccagaacaggtagtgaaaggg

SEQ ID NO: 8352 - DNA, 23 bp, Homo sapiens
aagcaatcaggacttatgcatgg

SEQ ID NO: 8353 - DNA, 23 bp, Homo sapiens
aaatggtattactaaagccatgg

SEQ ID NO: 8354 - DNA, 23 bp, Homo sapiens
gcacatatccttgcatattgtgg

SEQ ID NO: 8355 - DNA, 23 bp, Homo sapiens
ataactgagtcacacaactaagg

SEQ ID NO: 8356 - DNA, 23 bp, Homo sapiens
ttgtacacttacaatatggcagg

SEQ ID NO: 8357 - DNA, 23 bp, Homo sapiens
taaataaatcctttttgccaggg

SEQ ID NO: 8358 - DNA, 23 bp, Homo sapiens
gcatgtggcagttacttgaatgg

SEQ ID NO: 8359 - DNA, 23 bp, Homo sapiens
atttttctggatctacgtaaagg

SEQ ID NO: 8360 - DNA, 23 bp, Homo sapiens
ttttacaaatttattaacacggg

SEQ ID NO: 8361 - DNA, 23 bp, Homo sapiens
cagcacaaatcacaagagatggg

SEQ ID NO: 8362 - DNA, 23 bp, Homo sapiens
aagtgaagtaatatttctatggg

SEQ ID NO: 8363 - DNA, 23 bp, Homo sapiens
gtaacttaagtaaatgtaggagg

SEQ ID NO: 8364 - DNA, 23 bp, Homo sapiens
attctaatcgatgggtcttgtgg

SEQ ID NO: 8365 - DNA, 23 bp, Homo sapiens
aaactcttagatcatatgcctgg

SEQ ID NO: 8366 - DNA, 23 bp, Homo sapiens
ctgtggccatcaactattcaggg

SEQ ID NO: 8367 - DNA, 23 bp, Homo sapiens
aatccataattctaatcgatggg

SEQ ID NO: 8368 - DNA, 23 bp, Homo sapiens
tctttgtctagcctatctactgg

SEQ ID NO: 8369 - DNA, 23 bp, Homo sapiens
tcaaaacctaagcaaaccctggg

SEQ ID NO: 8370 - DNA, 23 bp, Homo sapiens
tctcagcctctacactcagcggg

SEQ ID NO: 8371 - DNA, 23 bp, Homo sapiens
gagggggagagattggagagagg

SEQ ID NO: 8372 - DNA, 23 bp, Homo sapiens
tgaatgcctgttgtgtaagaagg

SEQ ID NO: 8373 - DNA, 23 bp, Homo sapiens
atgagaggcatgacagtgaatgg

SEQ ID NO: 8374 - DNA, 23 bp, Homo sapiens
aactaggtaaattttctccaagg

SEQ ID NO: 8375 - DNA, 23 bp, Homo sapiens
atattgactgaattgactgtagg

SEQ ID NO: 8376 - DNA, 23 bp, Homo sapiens
acaaaagcactctgagctaaggg

SEQ ID NO: 8377 - DNA, 23 bp, Homo sapiens
taagaggcccttcctaaagaagg

SEQ ID NO: 8378 - DNA, 23 bp, Homo sapiens
gtgtactgtgctgttaggcacgg

SEQ ID NO: 8379 - DNA, 23 bp, Homo sapiens
ataggagtaatcatgcttcaggg

SEQ ID NO: 8380 - DNA, 23 bp, Homo sapiens
tgaaattgttcttattaaagggg

SEQ ID NO: 8381 - DNA, 23 bp, Homo sapiens
ctgtacctgctctacttcaaagg

SEQ ID NO: 8382 - DNA, 23 bp, Homo sapiens
tgttgtgtagatgggagtgatgg

SEQ ID NO: 8383 - DNA, 23 bp, Homo sapiens
attactttccttgaggcagaggg

SEQ ID NO: 8384 - DNA, 23 bp, Homo sapiens
tatatgtataattatcttggtgg

SEQ ID NO: 8385 - DNA, 23 bp, Homo sapiens
aaatccataattctaatcgatgg

SEQ ID NO: 8386 - DNA, 23 bp, Homo sapiens
ggttccatacaatattgaaaggg

SEQ ID NO: 8387 - DNA, 23 bp, Homo sapiens
ctttagcttatgaaactcatggg

SEQ ID NO: 8388 - DNA, 23 bp, Homo sapiens
tatgtgatggtactttcctaagg

SEQ ID NO: 8389 - DNA, 23 bp, Homo sapiens
ttgtctatttgacactgggtcgg

SEQ ID NO: 8390 - DNA, 23 bp, Homo sapiens
tttttgttctgaggttgctgagg

SEQ ID NO: 8391 - DNA, 23 bp, Homo sapiens
actaatgtatcacaatatgcagg

SEQ ID NO: 8392 - DNA, 23 bp, Homo sapiens
acaagattccttcataaggatgg

SEQ ID NO: 8393 - DNA, 23 bp, Homo sapiens
tcctggcttctaggatcaagtgg

SEQ ID NO: 8394 - DNA, 23 bp, Homo sapiens
tgaagctatcattagaggaaagg

SEQ ID NO: 8395 - DNA, 23 bp, Homo sapiens
tctattacgatgaggttgatggg

SEQ ID NO: 8396 - DNA, 23 bp, Homo sapiens
agagggtaagtgcactgaaaggg

SEQ ID NO: 8397 - DNA, 23 bp, Homo sapiens
tctaactcagagctattaggagg

SEQ ID NO: 8398 - DNA, 23 bp, Homo sapiens
tgagaggtatgtataacaatggg

SEQ ID NO: 8399 - DNA, 23 bp, Homo sapiens
tacccattagttcccccataggg

SEQ ID NO: 8400 - DNA, 23 bp, Homo sapiens
ttgaagtagaaaattctgacagg

SEQ ID NO: 8401 - DNA, 23 bp, Homo sapiens
atttacagaaacaaaccataggg

SEQ ID NO: 8402 - DNA, 23 bp, Homo sapiens
acttctggttattactggcccgg

SEQ ID NO: 8403 - DNA, 23 bp, Homo sapiens
gggagtttatggttgttgtaggg

SEQ ID NO: 8404 - DNA, 23 bp, Homo sapiens
agtaaactgctttagacaagtgg

SEQ ID NO: 8405 - DNA, 23 bp, Homo sapiens
agtaggcaagagaagggcattgg

SEQ ID NO: 8406 - DNA, 23 bp, Homo sapiens
gcatgcacgtgttttccataggg

SEQ ID NO: 8407 - DNA, 23 bp, Homo sapiens
aactcaagtaagattggaagtgg

SEQ ID NO: 8408 - DNA, 23 bp, Homo sapiens
ccaagtatcattttgagttgggg

SEQ ID NO: 8409 - DNA, 23 bp, Homo sapiens
taaactgtcatctatattggtgg

SEQ ID NO: 8410 - DNA, 23 bp, Homo sapiens
atgtttgtatgaacagagacagg

SEQ ID NO: 8411 - DNA, 23 bp, Homo sapiens
agctgcttcttcatgataggagg

SEQ ID NO: 8412 - DNA, 23 bp, Homo sapiens
tcagaagagcacaagtaagttgg

SEQ ID NO: 8413 - DNA, 23 bp, Homo sapiens
taaggtccaatgaaatatgatgg

SEQ ID NO: 8414 - DNA, 23 bp, Homo sapiens
gtaccgagaattaagaatatggg

SEQ ID NO: 8415 - DNA, 23 bp, Homo sapiens
tctgtcatggaaagatgccttgg

SEQ ID NO: 8416 - DNA, 23 bp, Homo sapiens
ccttatttctcctcaaggcaagg

SEQ ID NO: 8417 - DNA, 23 bp, Homo sapiens
gttgtgccaggagggggcaaagg

SEQ ID NO: 8418 - DNA, 23 bp, Homo sapiens
cagataataacattgtgcctagg

SEQ ID NO: 8419 - DNA, 23 bp, Homo sapiens
ggtatcatacgtacacatatggg

SEQ ID NO: 8420 - DNA, 23 bp, Homo sapiens
aataactctgtactgtttggtgg

SEQ ID NO: 8421 - DNA, 23 bp, Homo sapiens
ggatatccttttttgttctgagg

SEQ ID NO: 8422 - DNA, 23 bp, Homo sapiens
aacctaaaggcatttatcaaggg

SEQ ID NO: 8423 - DNA, 23 bp, Homo sapiens
ataagttgaaatgtaccaatggg

SEQ ID NO: 8424 - DNA, 23 bp, Homo sapiens
atgagaggtatgtataacaatgg

SEQ ID NO: 8425 - DNA, 23 bp, Homo sapiens
gccacttgatcctagaagccagg

SEQ ID NO: 8426 - DNA, 23 bp, Homo sapiens
ttgtgaagagaaaatttgactgg

SEQ ID NO: 8427 - DNA, 23 bp, Homo sapiens
gagaactaacaacaataaagagg

SEQ ID NO: 8428 - DNA, 23 bp, Homo sapiens
gctttcagccaacaggatagagg

SEQ ID NO: 8429 - DNA, 23 bp, Homo sapiens
tagtaactttgtgtaaaggtggg

SEQ ID NO: 8430 - DNA, 23 bp, Homo sapiens
tgatcgatctatctatctgtagg

SEQ ID NO: 8431 - DNA, 23 bp, Homo sapiens
tataactgtagaaatacaaaagg

SEQ ID NO: 8432 - DNA, 23 bp, Homo sapiens
agggttagtgtaatatctaaagg

SEQ ID NO: 8433 - DNA, 23 bp, Homo sapiens
tcagagagcaagatggcataggg

SEQ ID NO: 8434 - DNA, 23 bp, Homo sapiens
accattttatttatctgcaccgg

SEQ ID NO: 8435 - DNA, 23 bp, Homo sapiens
ttaataggatgcataatgtcagg

SEQ ID NO: 8436 - DNA, 23 bp, Homo sapiens
ctgttactgaaagcataagatgg

SEQ ID NO: 8437 - DNA, 23 bp, Homo sapiens
aatttgaatgaattattggatgg

SEQ ID NO: 8438 - DNA, 23 bp, Homo sapiens
attttcttctcacagatgactgg

SEQ ID NO: 8439 - DNA, 23 bp, Homo sapiens
aaaaaagctttgaatagtgtggg

SEQ ID NO: 8440 - DNA, 23 bp, Homo sapiens
catattttaatttatggacgtgg

SEQ ID NO: 8441 - DNA, 23 bp, Homo sapiens
attgaggaggatgcaggtagggg

SEQ ID NO: 8442 - DNA, 23 bp, Homo sapiens
cattcagcttcataagtcccagg

SEQ ID NO: 8443 - DNA, 23 bp, Homo sapiens
aaaaggctcaactataacactgg

SEQ ID NO: 8444 - DNA, 23 bp, Homo sapiens
actacaactaggatgccaaatgg

SEQ ID NO: 8445 - DNA, 23 bp, Homo sapiens
ggtgatttcaacggagggaatgg

SEQ ID NO: 8446 - DNA, 23 bp, Homo sapiens
tggtccatcgactcgtactcagg

SEQ ID NO: 8447 - DNA, 23 bp, Homo sapiens
tgagattgctgtaggtttcgtgg

SEQ ID NO: 8448 - DNA, 23 bp, Homo sapiens
atgaaagtagaaaccattacggg

SEQ ID NO: 8449 - DNA, 23 bp, Homo sapiens
tttttggcaatccttcctaaagg

SEQ ID NO: 8450 - DNA, 23 bp, Homo sapiens
ttcttaatcacagagacaaatgg

SEQ ID NO: 8451 - DNA, 23 bp, Homo sapiens
cctccataaaactagaagaatgg

SEQ ID NO: 8452 - DNA, 23 bp, Homo sapiens
aataccagaaagacagcaatggg

SEQ ID NO: 8453 - DNA, 23 bp, Homo sapiens
gtatcctgatatatgttggttgg

SEQ ID NO: 8454 - DNA, 23 bp, Homo sapiens
acaaaaaaccagaaagagttggg

SEQ ID NO: 8455 - DNA, 23 bp, Homo sapiens
gaggtgttgctgattagagtagg

SEQ ID NO: 8456 - DNA, 23 bp, Homo sapiens
tttgtgtacacatagtgtaaagg

SEQ ID NO: 8457 - DNA, 23 bp, Homo sapiens
aggcaaatttcttttttcgtcgg

SEQ ID NO: 8458 - DNA, 23 bp, Homo sapiens
gagtgaacagcaatacttaaggg

SEQ ID NO: 8459 - DNA, 23 bp, Homo sapiens
ataatacaaagcacgtaaaaggg

SEQ ID NO: 8460 - DNA, 23 bp, Homo sapiens
gggttccatacaatattgaaagg

SEQ ID NO: 8461 - DNA, 23 bp, Homo sapiens
ttgtttggatctccacatgtagg

SEQ ID NO: 8462 - DNA, 23 bp, Homo sapiens
agttgttgagaatgattcctagg

SEQ ID NO: 8463 - DNA, 23 bp, Homo sapiens
ataaatgtaaattacatgctagg

SEQ ID NO: 8464 - DNA, 23 bp, Homo sapiens
ttttccagtttctataaaagtgg

SEQ ID NO: 8465 - DNA, 23 bp, Homo sapiens
aggctcttaaaagtagatgtagg

SEQ ID NO: 8466 - DNA, 23 bp, Homo sapiens
ctatcattagaggaaaggttggg

SEQ ID NO: 8467 - DNA, 23 bp, Homo sapiens
ccaaaggttgaattttctctggg

SEQ ID NO: 8468 - DNA, 23 bp, Homo sapiens
ttcacttagtcatagtccactgg

SEQ ID NO: 8469 - DNA, 23 bp, Homo sapiens
agtatcactaatttgcttcgagg

SEQ ID NO: 8470 - DNA, 23 bp, Homo sapiens
cctagaaatacaaattaagttgg

SEQ ID NO: 8471 - DNA, 23 bp, Homo sapiens
ttcgtccatctcttaagcatagg

SEQ ID NO: 8472 - DNA, 23 bp, Homo sapiens
atataaactagaatgatgtttgg

SEQ ID NO: 8473 - DNA, 23 bp, Homo sapiens
ttaatgcaccattttttcacagg

SEQ ID NO: 8474 - DNA, 23 bp, Homo sapiens
tttatatcttaactttgtagtgg

SEQ ID NO: 8475 - DNA, 23 bp, Homo sapiens
ggaggagtaggagaggcggctgg

SEQ ID NO: 8476 - DNA, 23 bp, Homo sapiens
agaagctgcttcttcatgatagg

SEQ ID NO: 8477 - DNA, 23 bp, Homo sapiens
gtaactttatcggtcaaaatggg

SEQ ID NO: 8478 - DNA, 23 bp, Homo sapiens
tctctgatggcacagtagcctgg

SEQ ID NO: 8479 - DNA, 23 bp, Homo sapiens
tttaaatatctgttatgtgatgg

SEQ ID NO: 8480 - DNA, 23 bp, Homo sapiens
tatatgatcttagagtgtattgg

SEQ ID NO: 8481 - DNA, 23 bp, Homo sapiens
tctaaggttctctttgacaaagg

SEQ ID NO: 8482 - DNA, 23 bp, Homo sapiens
ctgcaatgcgattctatcactgg

SEQ ID NO: 8483 - DNA, 23 bp, Homo sapiens
tattttttaatcacacatgaagg

SEQ ID NO: 8484 - DNA, 23 bp, Homo sapiens
gcatctttccatgacagagcagg

SEQ ID NO: 8485 - DNA, 23 bp, Homo sapiens
gtgatatatgtgaaaggtaacgg

SEQ ID NO: 8486 - DNA, 23 bp, Homo sapiens
aacgggataaaccaagcaactgg

SEQ ID NO: 8487 - DNA, 23 bp, Homo sapiens
ttaaaatgtcttttattccaagg

SEQ ID NO: 8488 - DNA, 23 bp, Homo sapiens
tctattacttggcttcagatggg

SEQ ID NO: 8489 - DNA, 23 bp, Homo sapiens
tataaaagagtttaattgcatgg

SEQ ID NO: 8490 - DNA, 23 bp, Homo sapiens
ttataaaagttgaatggcaaagg

SEQ ID NO: 8491 - DNA, 23 bp, Homo sapiens
gatgaaagtaaggaggagatggg

SEQ ID NO: 8492 - DNA, 23 bp, Homo sapiens
gtaaacaaaccgacattccttgg

SEQ ID NO: 8493 - DNA, 23 bp, Homo sapiens
tgaggtgtgggaggaaaaatggg

SEQ ID NO: 8494 - DNA, 23 bp, Homo sapiens
tattacatactgtcattcactgg

SEQ ID NO: 8495 - DNA, 23 bp, Homo sapiens
cttaacatacaccagttgcttgg

SEQ ID NO: 8496 - DNA, 23 bp, Homo sapiens
gggatttctctcccttatgaagg

SEQ ID NO: 8497 - DNA, 23 bp, Homo sapiens
gtacagatcttcaaatatccagg

SEQ ID NO: 8498 - DNA, 23 bp, Homo sapiens
acagaaggaatcttaatgtcagg

SEQ ID NO: 8499 - DNA, 23 bp, Homo sapiens
acgagtcgatggaccattgtagg

SEQ ID NO: 8500 - DNA, 23 bp, Homo sapiens
cttattactagcgtgatgaatgg

SEQ ID NO: 8501 - DNA, 23 bp, Homo sapiens
ttaaaacaggttttcaaagaggg

SEQ ID NO: 8502 - DNA, 23 bp, Homo sapiens
aagatgccagtatcatcaactgg

SEQ ID NO: 8503 - DNA, 23 bp, Homo sapiens
gtaatttgttcagtcacatcagg

SEQ ID NO: 8504 - DNA, 23 bp, Homo sapiens
atgcatgtactttcaggcctagg

SEQ ID NO: 8505 - DNA, 23 bp, Homo sapiens
gtacctcaacaagaaagttaagg

SEQ ID NO: 8506 - DNA, 23 bp, Homo sapiens
ctacaactaggatgccaaatggg

SEQ ID NO: 8507 - DNA, 23 bp, Homo sapiens
gcacatttaacaaactcttaggg

SEQ ID NO: 8508 - DNA, 23 bp, Homo sapiens
tgactgttcgtttcgtgtgtagg

SEQ ID NO: 8509 - DNA, 23 bp, Homo sapiens
tataaaagttgaatggcaaaggg

SEQ ID NO: 8510 - DNA, 23 bp, Homo sapiens
agttgagccattcccagaacagg

SEQ ID NO: 8511 - DNA, 23 bp, Homo sapiens
tgtactgtgctgttaggcacggg

SEQ ID NO: 8512 - DNA, 23 bp, Homo sapiens
tcgtccatctcttaagcataggg

SEQ ID NO: 8513 - DNA, 23 bp, Homo sapiens
tctaatttgtgttaattactggg

SEQ ID NO: 8514 - DNA, 23 bp, Homo sapiens
ggattgttatttaaatttggtgg

SEQ ID NO: 8515 - DNA, 23 bp, Homo sapiens
acattccccagggtttgcttagg

SEQ ID NO: 8516 - DNA, 23 bp, Homo sapiens
agtcacatcaggatgtataaagg

SEQ ID NO: 8517 - DNA, 23 bp, Homo sapiens
ttaaatgagttaaaaacgtatgg

SEQ ID NO: 8518 - DNA, 23 bp, Homo sapiens
ggtctgagtttctctctgcttgg

SEQ ID NO: 8519 - DNA, 23 bp, Homo sapiens
ttaggtgtctctgggaactctgg

SEQ ID NO: 8520 - DNA, 23 bp, Homo sapiens
gagttcttatggcagcagtcagg

SEQ ID NO: 8521 - DNA, 23 bp, Homo sapiens
tcaaagatatactcaaagattgg

SEQ ID NO: 8522 - DNA, 23 bp, Homo sapiens
gtctcagtatactgtgaaaaggg

SEQ ID NO: 8523 - DNA, 23 bp, Homo sapiens
tttatagtaactttgtgtaaagg

SEQ ID NO: 8524 - DNA, 23 bp, Homo sapiens
ggaggtcgattagaaaaatctgg

SEQ ID NO: 8525 - DNA, 23 bp, Homo sapiens
tcaatggtttggaagctactagg

SEQ ID NO: 8526 - DNA, 23 bp, Homo sapiens
ggacaagttgtgccaggaggggg

SEQ ID NO: 8527 - DNA, 23 bp, Homo sapiens
ttctcaggatttttgaagcccgg

SEQ ID NO: 8528 - DNA, 23 bp, Homo sapiens
ttatggttgttgtagggcagtgg

SEQ ID NO: 8529 - DNA, 23 bp, Homo sapiens
gatttcagagatggctagcttgg

SEQ ID NO: 8530 - DNA, 23 bp, Homo sapiens
tgataattctaaataagaatagg

SEQ ID NO: 8531 - DNA, 23 bp, Homo sapiens
gtatgatacgactgttaacctgg

SEQ ID NO: 8532 - DNA, 23 bp, Homo sapiens
attctgtgtctttcattacctgg

SEQ ID NO: 8533 - DNA, 23 bp, Homo sapiens
gttggtgctggcagcttagtggg

SEQ ID NO: 8534 - DNA, 23 bp, Homo sapiens
gagaaacaataaaccaatgatgg

SEQ ID NO: 8535 - DNA, 23 bp, Homo sapiens
gttaacttgctaaaattcatggg

SEQ ID NO: 8536 - DNA, 23 bp, Homo sapiens
tcagttggatttctttcaaaggg

SEQ ID NO: 8537 - DNA, 23 bp, Homo sapiens
atttttagaataatgatatgagg

SEQ ID NO: 8538 - DNA, 23 bp, Homo sapiens
ttctcagtcaagcagaactctgg

SEQ ID NO: 8539 - DNA, 23 bp, Homo sapiens
atccctatgggggaactaatggg

SEQ ID NO: 8540 - DNA, 23 bp, Homo sapiens
aataattcagaggacaaaacagg

SEQ ID NO: 8541 - DNA, 23 bp, Homo sapiens
cttgccttgaggagaaataaggg

SEQ ID NO: 8542 - DNA, 23 bp, Homo sapiens
tctcagtccacaaagttgatagg

SEQ ID NO: 8543 - DNA, 23 bp, Homo sapiens
ctattcgaagttatacatatggg

SEQ ID NO: 8544 - DNA, 23 bp, Homo sapiens
tcaacaatttattcataaagtgg

SEQ ID NO: 8545 - DNA, 23 bp, Homo sapiens
cgatgggtcttgtggaatagtgg

SEQ ID NO: 8546 - DNA, 23 bp, Homo sapiens
gtaagatatccataatcaattgg

SEQ ID NO: 8547 - DNA, 23 bp, Homo sapiens
actaccccgtctctattacttgg

SEQ ID NO: 8548 - DNA, 23 bp, Homo sapiens
ctttaagacacagtagagatagg

SEQ ID NO: 8549 - DNA, 23 bp, Homo sapiens
gttatgctcttatgtataagagg

SEQ ID NO: 8550 - DNA, 23 bp, Homo sapiens
tatgttgtcagaaacatctaagg

SEQ ID NO: 8551 - DNA, 23 bp, Homo sapiens
ccccaactcaaaatgatacttgg

SEQ ID NO: 8552 - DNA, 23 bp, Homo sapiens
ataccattctttgaaatggcagg

SEQ ID NO: 8553 - DNA, 23 bp, Homo sapiens
aacagcagatacagacaataggg

SEQ ID NO: 8554 - DNA, 23 bp, Homo sapiens
tctagaatgactggtttagatgg

SEQ ID NO: 8555 - DNA, 23 bp, Homo sapiens
tgtactccttgcaggtcgccggg

SEQ ID NO: 8556 - DNA, 23 bp, Homo sapiens
ttttaaatacatcagggcttagg

SEQ ID NO: 8557 - DNA, 23 bp, Homo sapiens
aataatcacttactaaaaatggg

SEQ ID NO: 8558 - DNA, 23 bp, Homo sapiens
tgtctcttgataccagagatagg

SEQ ID NO: 8559 - DNA, 23 bp, Homo sapiens
tgagctttcactgcccctacagg

SEQ ID NO: 8560 - DNA, 23 bp, Homo sapiens
gtgacccaatgagaatcaattgg

SEQ ID NO: 8561 - DNA, 23 bp, Homo sapiens
ccagttaagaagacaaaaatggg

SEQ ID NO: 8562 - DNA, 23 bp, Homo sapiens
ggaaataaagatataaaaagtgg

SEQ ID NO: 8563 - DNA, 23 bp, Homo sapiens
tatattttccatagagaccttgg

SEQ ID NO: 8564 - DNA, 23 bp, Homo sapiens
caagtgggctcatccatcattgg

SEQ ID NO: 8565 - DNA, 23 bp, Homo sapiens
ataaactgaaagtcaaatgtagg

SEQ ID NO: 8566 - DNA, 23 bp, Homo sapiens
gcaggttatcatatgaatagtgg

SEQ ID NO: 8567 - DNA, 23 bp, Homo sapiens
gttttattgccaaagttgtaagg

SEQ ID NO: 8568 - DNA, 23 bp, Homo sapiens
tgtttagtactttctatatgagg

SEQ ID NO: 8569 - DNA, 23 bp, Homo sapiens
taatagagaaaactgaagatagg

SEQ ID NO: 8570 - DNA, 23 bp, Homo sapiens
tttcagccaaaaatttccttggg

SEQ ID NO: 8571 - DNA, 23 bp, Homo sapiens
ataatactaaacacttacatagg

SEQ ID NO: 8572 - DNA, 23 bp, Homo sapiens
acaaaaatgttgccacctactgg

SEQ ID NO: 8573 - DNA, 23 bp, Homo sapiens
gtgttacttgacttgtcctcagg

SEQ ID NO: 8574 - DNA, 23 bp, Homo sapiens
agaagagcttgaaaatcatatgg

SEQ ID NO: 8575 - DNA, 23 bp, Homo sapiens
ataaatatgaattcccgtaatgg

SEQ ID NO: 8576 - DNA, 23 bp, Homo sapiens
agtaaagaacatttactgaatgg

SEQ ID NO: 8577 - DNA, 23 bp, Homo sapiens
gttaaaacaggttttcaaagagg

SEQ ID NO: 8578 - DNA, 23 bp, Homo sapiens
agaaataatacatagaattacgg

SEQ ID NO: 8579 - DNA, 23 bp, Homo sapiens
ggagtcttggatcaaataacagg

SEQ ID NO: 8580 - DNA, 23 bp, Homo sapiens
ttatacatacctctcatcattgg

SEQ ID NO: 8581 - DNA, 23 bp, Homo sapiens
atgatgttaatatttcagattgg

SEQ ID NO: 8582 - DNA, 23 bp, Homo sapiens
attcagcttattaaaccctatgg

SEQ ID NO: 8583 - DNA, 23 bp, Homo sapiens
tggaaatatttcattacctaggg

SEQ ID NO: 8584 - DNA, 23 bp, Homo sapiens
ttttaccttatactgatatgagg

SEQ ID NO: 8585 - DNA, 23 bp, Homo sapiens
gctaaaaacaaaggactttgagg

SEQ ID NO: 8586 - DNA, 23 bp, Homo sapiens
tgactccctccttacaactttgg

SEQ ID NO: 8587 - DNA, 23 bp, Homo sapiens
gaaactgtaaatctggaataggg

SEQ ID NO: 8588 - DNA, 23 bp, Homo sapiens
tctatagcctattaaacaaaagg

SEQ ID NO: 8589 - DNA, 23 bp, Homo sapiens
ggcaaattctcctaaatcaatgg

SEQ ID NO: 8590 - DNA, 23 bp, Homo sapiens
gtgattttataaaagttgaatgg

SEQ ID NO: 8591 - DNA, 23 bp, Homo sapiens
aataagactgtcttcacaactgg

SEQ ID NO: 8592 - DNA, 23 bp, Homo sapiens
ctaactgtatttggaaatcaggg

SEQ ID NO: 8593 - DNA, 23 bp, Homo sapiens
ccataggattaataaaacttagg

SEQ ID NO: 8594 - DNA, 23 bp, Homo sapiens
tttggtacctcaaatagttcagg

SEQ ID NO: 8595 - DNA, 23 bp, Homo sapiens
tcacacaaaataactaaaatggg

SEQ ID NO: 8596 - DNA, 23 bp, Homo sapiens
cattttgtctatttgacactggg

SEQ ID NO: 8597 - DNA, 23 bp, Homo sapiens
aaatgcttcaaattatacttagg

SEQ ID NO: 8598 - DNA, 23 bp, Homo sapiens
tctttgacaaaggctgctaatgg

SEQ ID NO: 8599 - DNA, 23 bp, Homo sapiens
acattttgtctatttgacactgg

SEQ ID NO: 8600 - DNA, 23 bp, Homo sapiens
tgagaaatcatgtttttgacagg

SEQ ID NO: 8601 - DNA, 23 bp, Homo sapiens
gtgcttgcttgcaatatttgtgg

SEQ ID NO: 8602 - DNA, 23 bp, Homo sapiens
catgcttccatttcctcagttgg

SEQ ID NO: 8603 - DNA, 23 bp, Homo sapiens
tttctatgttcacctcacttagg

SEQ ID NO: 8604 - DNA, 23 bp, Homo sapiens
ggtcaattttgaagataaatggg

SEQ ID NO: 8605 - DNA, 23 bp, Homo sapiens
acagggcttgtttctcaagttgg

SEQ ID NO: 8606 - DNA, 23 bp, Homo sapiens
gttgaaatcaccaagacttaagg

SEQ ID NO: 8607 - DNA, 23 bp, Homo sapiens
gtatgttagttaaatactaatgg

SEQ ID NO: 8608 - DNA, 23 bp, Homo sapiens
atagaattacggctgattatggg

SEQ ID NO: 8609 - DNA, 23 bp, Homo sapiens
ttccactgctttcagccaacagg

SEQ ID NO: 8610 - DNA, 23 bp, Homo sapiens
acttgttcctgaactatttgagg

SEQ ID NO: 8611 - DNA, 23 bp, Homo sapiens
ttacaaaaccctgtttgttaggg

SEQ ID NO: 8612 - DNA, 23 bp, Homo sapiens
aaaataacgttctctataagagg

SEQ ID NO: 8613 - DNA, 23 bp, Homo sapiens
tttgtcacaaaagtgctttaggg

SEQ ID NO: 8614 - DNA, 23 bp, Homo sapiens
gctcatcttagacagctatatgg

SEQ ID NO: 8615 - DNA, 23 bp, Homo sapiens
atttccacaaattcaatcaatgg

SEQ ID NO: 8616 - DNA, 23 bp, Homo sapiens
tatgttagttaaatactaatggg

SEQ ID NO: 8617 - DNA, 23 bp, Homo sapiens
cagcccatattcttaattctcgg

SEQ ID NO: 8618 - DNA, 23 bp, Homo sapiens
tattatctgaaaagcttgatagg

SEQ ID NO: 8619 - DNA, 23 bp, Homo sapiens
gagagagcatgtaactttatcgg

SEQ ID NO: 8620 - DNA, 23 bp, Homo sapiens
atacaccaagcaaagatataggg

SEQ ID NO: 8621 - DNA, 23 bp, Homo sapiens
gatttagagttctagttatgagg

SEQ ID NO: 8622 - DNA, 23 bp, Homo sapiens
ccttcttgattttatgagaaagg

SEQ ID NO: 8623 - DNA, 23 bp, Homo sapiens
atattataaacatataaaattgg

SEQ ID NO: 8624 - DNA, 23 bp, Homo sapiens
agaatttctctgactagaaatgg

SEQ ID NO: 8625 - DNA, 23 bp, Homo sapiens
tttaaaataacatttatataggg

SEQ ID NO: 8626 - DNA, 23 bp, Homo sapiens
tcctctagcacgtttcgaattgg

SEQ ID NO: 8627 - DNA, 23 bp, Homo sapiens
gtatatgtatatatgttctaagg

SEQ ID NO: 8628 - DNA, 23 bp, Homo sapiens
agatgatgttacatgtagttagg

SEQ ID NO: 8629 - DNA, 23 bp, Homo sapiens
gcaattcttgcatcatgtattgg

SEQ ID NO: 8630 - DNA, 23 bp, Homo sapiens
ggagaacgagtgatgtaatttgg

SEQ ID NO: 8631 - DNA, 23 bp, Homo sapiens
cactcccgtctcaaatataaggg

SEQ ID NO: 8632 - DNA, 23 bp, Homo sapiens
ctttgtaaaggacaagaataggg

SEQ ID NO: 8633 - DNA, 23 bp, Homo sapiens
ataccgagtaaaagattctaagg

SEQ ID NO: 8634 - DNA, 23 bp, Homo sapiens
ttacgagtaccaacactattagg

SEQ ID NO: 8635 - DNA, 23 bp, Homo sapiens
agcaatgttggccaactatacgg

SEQ ID NO: 8636 - DNA, 23 bp, Homo sapiens
ttcattgtacacttacaatatgg

SEQ ID NO: 8637 - DNA, 23 bp, Homo sapiens
aatgaaatttcaaatccatttgg

SEQ ID NO: 8638 - DNA, 23 bp, Homo sapiens
tccattttcaaggtattgattgg

SEQ ID NO: 8639 - DNA, 23 bp, Homo sapiens
tttctactcaagtcagataatgg

SEQ ID NO: 8640 - DNA, 23 bp, Homo sapiens
ggctttatattacactaaaaagg

SEQ ID NO: 8641 - DNA, 23 bp, Homo sapiens
cttaaatacgagctaggttaagg

SEQ ID NO: 8642 - DNA, 23 bp, Homo sapiens
gaaagaggactacatatcttagg

SEQ ID NO: 8643 - DNA, 23 bp, Homo sapiens
ctttacattgacatgcttaaggg

SEQ ID NO: 8644 - DNA, 23 bp, Homo sapiens
gcagaactctggacaccttctgg

SEQ ID NO: 8645 - DNA, 23 bp, Homo sapiens
agaatctctttccttgaataggg

SEQ ID NO: 8646 - DNA, 23 bp, Homo sapiens
tgccttggtctaattctcttagg

SEQ ID NO: 8647 - DNA, 23 bp, Homo sapiens
tgagcagaacaaacaaatattgg

SEQ ID NO: 8648 - DNA, 23 bp, Homo sapiens
tgcccttgataaatgcctttagg

SEQ ID NO: 8649 - DNA, 23 bp, Homo sapiens
ggtgtatgctccttaatcttagg

SEQ ID NO: 8650 - DNA, 23 bp, Homo sapiens
tttctcagaaatttattagatgg

SEQ ID NO: 8651 - DNA, 23 bp, Homo sapiens
atagcaagcctgtgaaaaaatgg

SEQ ID NO: 8652 - DNA, 23 bp, Homo sapiens
tggagaggcactttgcctttagg

SEQ ID NO: 8653 - DNA, 23 bp, Homo sapiens
cagagtgtatcatcaaaattagg

SEQ ID NO: 8654 - DNA, 23 bp, Homo sapiens
aggagtggaagagagagaattgg

SEQ ID NO: 8655 - DNA, 23 bp, Homo sapiens
atttcctaacctattttgatagg

SEQ ID NO: 8656 - DNA, 23 bp, Homo sapiens
atgctgttagaaattttagatgg

SEQ ID NO: 8657 - DNA, 23 bp, Homo sapiens
tttataaatataatgcaaaatgg

SEQ ID NO: 8658 - DNA, 23 bp, Homo sapiens
aagacatcgctcattaaaaaagg

SEQ ID NO: 8659 - DNA, 23 bp, Homo sapiens
cagcaacctcagaacaaaaaagg

SEQ ID NO: 8660 - DNA, 23 bp, Homo sapiens
gggaggagtgtactccttgcagg

SEQ ID NO: 8661 - DNA, 23 bp, Homo sapiens
gttctatgtccctggcaaaaagg

SEQ ID NO: 8662 - DNA, 23 bp, Homo sapiens
gttcatacaaacattcgatttgg

SEQ ID NO: 8663 - DNA, 23 bp, Homo sapiens
ttttagtatctactcattagagg

SEQ ID NO: 8664 - DNA, 23 bp, Homo sapiens
tctgccacttttatagaaactgg

SEQ ID NO: 8665 - DNA, 23 bp, Homo sapiens
ttagtgatacttttaatctaagg

SEQ ID NO: 8666 - DNA, 23 bp, Homo sapiens
tgactttcagtttatttaacagg

SEQ ID NO: 8667 - DNA, 23 bp, Homo sapiens
tttggagtaaaaatacaaattgg

SEQ ID NO: 8668 - DNA, 23 bp, Homo sapiens
tatggtgcaatttttttcattgg

SEQ ID NO: 8669 - DNA, 23 bp, Homo sapiens
tatcatggtaaagagctttatgg

SEQ ID NO: 8670 - DNA, 23 bp, Homo sapiens
atataatatctgtttcaatttgg

SEQ ID NO: 8671 - DNA, 23 bp, Homo sapiens
aagtggctgcaaatataatttgg

SEQ ID NO: 8672 - DNA, 23 bp, Homo sapiens
ttaaagctcttctagattactgg

SEQ ID NO: 8673 - DNA, 23 bp, Homo sapiens
cttttattccaaggtctctatgg

SEQ ID NO: 8674 - DNA, 23 bp, Homo sapiens
agacccatcgattagaattatgg

SEQ ID NO: 8675 - DNA, 23 bp, Homo sapiens
tttagctcaactctataaattgg

SEQ ID NO: 8676 - DNA, 23 bp, Homo sapiens
ctgaaattgttcttattaaaggg

SEQ ID NO: 8677 - DNA, 23 bp, Homo sapiens
aactcagtacatattctatttgg

SEQ ID NO: 8678 - DNA, 23 bp, Homo sapiens
ataagtttaccaattgattatgg

SEQ ID NO: 8679 - DNA, 23 bp, Homo sapiens
gcagaggtgcagattatatttgg

SEQ ID NO: 8680 - DNA, 23 bp, Homo sapiens
ttttatataaaacctgaaattgg

SEQ ID NO: 8681 - DNA, 23 bp, Homo sapiens
acaaagagttgaaaattaattgg

SEQ ID NO: 8682 - DNA, 23 bp, Homo sapiens
gttaagtgaatgaacaaaattgg

SEQ ID NO: 8683 - DNA, 23 bp, Homo sapiens
ttaatcagtcatttataaatagg

SEQ ID NO: 8684 - DNA, 23 bp, Homo sapiens
ttaaagtcattttaactatttgg

SEQ ID NO: 8685 - DNA, 23 bp, Homo sapiens
ttacatttggtaaagatatttgg

SEQ ID NO: 8686 - DNA, 23 bp, Homo sapiens
gtttggttcaattagattttagg

SEQ ID NO: 8687 - DNA, 23 bp, Homo sapiens
gcttcatgatatggtataattgg

SEQ ID NO: 8688 - DNA, 23 bp, Homo sapiens
tttactgatgtttttctaaatgg

SEQ ID NO: 8689 - DNA, 23 bp, Homo sapiens
tcatgtacccctgacaaagaagg

SEQ ID NO: 8690 - DNA, 23 bp, Homo sapiens
gttaacttccttctttgtcaggg

SEQ ID NO: 8691 - DNA, 23 bp, Homo sapiens
aggatgtaagagagtaattgagg

SEQ ID NO: 8692 - DNA, 23 bp, Homo sapiens
tctttgtcaggggtacatgatgg

SEQ ID NO: 8693 - DNA, 23 bp, Homo sapiens
ctgggaatataaatctaaatggg

SEQ ID NO: 8694 - DNA, 23 bp, Homo sapiens
aattagaactctaggtaaatcgg

SEQ ID NO: 8695 - DNA, 23 bp, Homo sapiens
agatttatattcccagtaaaagg

SEQ ID NO: 8696 - DNA, 23 bp, Homo sapiens
ctactgcttaatcacccatgggg

SEQ ID NO: 8697 - DNA, 23 bp, Homo sapiens
aacatgaaccagatgcacagagg

SEQ ID NO: 8698 - DNA, 23 bp, Homo sapiens
aataacataaagaagctgcgtgg

SEQ ID NO: 8699 - DNA, 23 bp, Homo sapiens
tggaaacctagagtgcacaaagg

SEQ ID NO: 8700 - DNA, 23 bp, Homo sapiens
atagactttataaaacctagagg

SEQ ID NO: 8701 - DNA, 23 bp, Homo sapiens
ggcctaggttcacagcccagcgg

SEQ ID NO: 8702 - DNA, 23 bp, Homo sapiens
cacaaaggagaagacactggtgg

SEQ ID NO: 8703 - DNA, 23 bp, Homo sapiens
agagtcaaatagacacttggggg

SEQ ID NO: 8704 - DNA, 23 bp, Homo sapiens
taattcatagtaatctcctgggg

SEQ ID NO: 8705 - DNA, 23 bp, Homo sapiens
gctcaaaaattctagcaaggtgg

SEQ ID NO: 8706 - DNA, 23 bp, Homo sapiens
agggtttggatagatccagtcgg

SEQ ID NO: 8707 - DNA, 23 bp, Homo sapiens
agatacgttttcatgtccggggg

SEQ ID NO: 8708 - DNA, 23 bp, Homo sapiens
tgactggcaatagagagccgagg

SEQ ID NO: 8709 - DNA, 23 bp, Homo sapiens
aagcccactatcagtcaccccgg

SEQ ID NO: 8710 - DNA, 23 bp, Homo sapiens
gaagaacctaaggattgtggagg

SEQ ID NO: 8711 - DNA, 23 bp, Homo sapiens
gtgcacaaaggagaagacactgg

SEQ ID NO: 8712 - DNA, 23 bp, Homo sapiens
tcactacccctagatgtgagagg

SEQ ID NO: 8713 - DNA, 23 bp, Homo sapiens
tctgagaaataatagttccgggg

SEQ ID NO: 8714 - DNA, 23 bp, Homo sapiens
tggttgtagagcttaccgctggg

SEQ ID NO: 8715 - DNA, 23 bp, Homo sapiens
gaagtcttacacatttgaggggg

SEQ ID NO: 8716 - DNA, 23 bp, Homo sapiens
acacttctctctgtaagtggagg

SEQ ID NO: 8717 - DNA, 23 bp, Homo sapiens
gaggtgctgaacaaatgagtggg

SEQ ID NO: 8718 - DNA, 23 bp, Homo sapiens
ttagagacacatttaccatgagg

SEQ ID NO: 8719 - DNA, 23 bp, Homo sapiens
atgttgatatcataccccatggg

SEQ ID NO: 8720 - DNA, 23 bp, Homo sapiens
gctgtggaatacacttgggatgg

SEQ ID NO: 8721 - DNA, 23 bp, Homo sapiens
attagcaaggaagtgagtagtgg

SEQ ID NO: 8722 - DNA, 23 bp, Homo sapiens
cagagctcaagaaatctctgtgg

SEQ ID NO: 8723 - DNA, 23 bp, Homo sapiens
ctattaaatatgatcaagagtgg

SEQ ID NO: 8724 - DNA, 23 bp, Homo sapiens
ataaaattacagggaaacagggg

SEQ ID NO: 8725 - DNA, 23 bp, Homo sapiens
ttaaaaaaaaaaaaggaccaagg

SEQ ID NO: 8726 - DNA, 23 bp, Homo sapiens
tggcaaggacagtaaagaggtgg

SEQ ID NO: 8727 - DNA, 23 bp, Homo sapiens
ggcagacatcccttgaagggggg

SEQ ID NO: 8728 - DNA, 23 bp, Homo sapiens
ttattcgcctgctgtgatcgtgg

SEQ ID NO: 8729 - DNA, 23 bp, Homo sapiens
atttttctatcaagtgacgtggg

SEQ ID NO: 8730 - DNA, 23 bp, Homo sapiens
gacgcttccttccttcactgagg

SEQ ID NO: 8731 - DNA, 23 bp, Homo sapiens
tgaagtcttacacatttgagggg

SEQ ID NO: 8732 - DNA, 23 bp, Homo sapiens
tggcagacatcccttgaaggggg

SEQ ID NO: 8733 - DNA, 23 bp, Homo sapiens
ggaggtgctgaacaaatgagtgg

SEQ ID NO: 8734 - DNA, 23 bp, Homo sapiens
attgtacctctcacatctagggg

SEQ ID NO: 8735 - DNA, 23 bp, Homo sapiens
ataaaagcaacagaattggaggg

SEQ ID NO: 8736 - DNA, 23 bp, Homo sapiens
actcttcatataaaattacaggg

SEQ ID NO: 8737 - DNA, 23 bp, Homo sapiens
catacatagtcaaagtggcaagg

SEQ ID NO: 8738 - DNA, 23 bp, Homo sapiens
aaaatacacctaataaaaggagg

SEQ ID NO: 8739 - DNA, 23 bp, Homo sapiens
ttatgtcaatctcagctaggtgg

SEQ ID NO: 8740 - DNA, 23 bp, Homo sapiens
acttgaataatagtaactgtggg

SEQ ID NO: 8741 - DNA, 23 bp, Homo sapiens
ttggagaatgaagtgaggcaagg

SEQ ID NO: 8742 - DNA, 23 bp, Homo sapiens
ccattgcaaggctgaaccagagg

SEQ ID NO: 8743 - DNA, 23 bp, Homo sapiens
gttgcaattttaattccaggagg

SEQ ID NO: 8744 - DNA, 23 bp, Homo sapiens
tgatcgcacaaggtgcaggatgg

SEQ ID NO: 8745 - DNA, 23 bp, Homo sapiens
aactctgttagaatgtaggaagg

SEQ ID NO: 8746 - DNA, 23 bp, Homo sapiens
taatgctgtggaatacacttggg

SEQ ID NO: 8747 - DNA, 23 bp, Homo sapiens
aagatattaacattaataggagg

SEQ ID NO: 8748 - DNA, 23 bp, Homo sapiens
ggatgtctgccattaagtgaagg

SEQ ID NO: 8749 - DNA, 23 bp, Homo sapiens
agaaactaaaacttctgtgacgg

SEQ ID NO: 8750 - DNA, 23 bp, Homo sapiens
gagcatttagcctccaggagagg

SEQ ID NO: 8751 - DNA, 23 bp, Homo sapiens
gtggacccacagattaaggtagg

SEQ ID NO: 8752 - DNA, 23 bp, Homo sapiens
atagaacatgaaagattactggg

SEQ ID NO: 8753 - DNA, 23 bp, Homo sapiens
tatagtgtgaaattatggagggg

SEQ ID NO: 8754 - DNA, 23 bp, Homo sapiens
aatacacttgggatggtaggagg

SEQ ID NO: 8755 - DNA, 23 bp, Homo sapiens
gaacacatacatagtcaaagtgg

SEQ ID NO: 8756 - DNA, 23 bp, Homo sapiens
tacagcttcacagatgctgaggg

SEQ ID NO: 8757 - DNA, 23 bp, Homo sapiens
ttttatatgaagagtgtgagtgg

SEQ ID NO: 8758 - DNA, 23 bp, Homo sapiens
acgcaaacttcactgcacttggg

SEQ ID NO: 8759 - DNA, 23 bp, Homo sapiens
gttccggggtgactgatagtggg

SEQ ID NO: 8760 - DNA, 23 bp, Homo sapiens
tttctctaatcgctaaaccaagg

SEQ ID NO: 8761 - DNA, 23 bp, Homo sapiens
aaactgttcagctatatggatgg

SEQ ID NO: 8762 - DNA, 23 bp, Homo sapiens
atctagttactgaggcaagtagg

SEQ ID NO: 8763 - DNA, 23 bp, Homo sapiens
aaaacttacaaattaccaagagg

SEQ ID NO: 8764 - DNA, 23 bp, Homo sapiens
ggatgctgcatactattggcagg

SEQ ID NO: 8765 - DNA, 23 bp, Homo sapiens
ggagggaaaatacaatagcaagg

SEQ ID NO: 8766 - DNA, 23 bp, Homo sapiens
gtaatgaatttaaagtccaaagg

SEQ ID NO: 8767 - DNA, 23 bp, Homo sapiens
agatttatgtgacactggcaggg

SEQ ID NO: 8768 - DNA, 23 bp, Homo sapiens
atagtggtaggttaaagagctgg

SEQ ID NO: 8769 - DNA, 23 bp, Homo sapiens
catctggttggggatttttgggg

SEQ ID NO: 8770 - DNA, 23 bp, Homo sapiens
actggcagggaagtatcaaaggg

SEQ ID NO: 8771 - DNA, 23 bp, Homo sapiens
aaaggcacagaagcatgcacagg

SEQ ID NO: 8772 - DNA, 23 bp, Homo sapiens
ttttggtttatatcagcaggagg

SEQ ID NO: 8773 - DNA, 23 bp, Homo sapiens
gtaggtaaactaggccagtaggg

SEQ ID NO: 8774 - DNA, 23 bp, Homo sapiens
atagctggtccgaagtattgggg

SEQ ID NO: 8775 - DNA, 23 bp, Homo sapiens
agttttctgggtgattagcaagg

SEQ ID NO: 8776 - DNA, 23 bp, Homo sapiens
gcatctattggacattgagaagg

SEQ ID NO: 8777 - DNA, 23 bp, Homo sapiens
atgtcattcctcatagacattgg

SEQ ID NO: 8778 - DNA, 23 bp, Homo sapiens
tatggaatgttcgcatttggggg

SEQ ID NO: 8779 - DNA, 23 bp, Homo sapiens
tcattcctcatagacattggagg

SEQ ID NO: 8780 - DNA, 23 bp, Homo sapiens
actaaaactaaacagagaagtgg

SEQ ID NO: 8781 - DNA, 23 bp, Homo sapiens
ttatttctgaggatagtggtagg

SEQ ID NO: 8782 - DNA, 23 bp, Homo sapiens
acattcggttaggttgcacatgg

SEQ ID NO: 8783 - DNA, 23 bp, Homo sapiens
aagctcttgaatcttccctaagg

SEQ ID NO: 8784 - DNA, 23 bp, Homo sapiens
gaactagaggacaatagcgatgg

SEQ ID NO: 8785 - DNA, 23 bp, Homo sapiens
atgaacacattagttttaggggg

SEQ ID NO: 8786 - DNA, 23 bp, Homo sapiens
tataaaattacagggaaacaggg

SEQ ID NO: 8787 - DNA, 23 bp, Homo sapiens
ttagtggacctggtaaacactgg

SEQ ID NO: 8788 - DNA, 23 bp, Homo sapiens
taataactatggcaattagtggg

SEQ ID NO: 8789 - DNA, 23 bp, Homo sapiens
tgttgcatggcaataatgaatgg

SEQ ID NO: 8790 - DNA, 23 bp, Homo sapiens
cagatacgttttcatgtccgggg

SEQ ID NO: 8791 - DNA, 23 bp, Homo sapiens
aaaacgtgattatgaaaagaggg

SEQ ID NO: 8792 - DNA, 23 bp, Homo sapiens
tcacaggcctcagtgaaggaagg

SEQ ID NO: 8793 - DNA, 23 bp, Homo sapiens
aaaagtctatgtgatagaagtgg

SEQ ID NO: 8794 - DNA, 23 bp, Homo sapiens
taccttaagtagactagcagtgg

SEQ ID NO: 8795 - DNA, 23 bp, Homo sapiens
tttttaacataaccttgccaagg

SEQ ID NO: 8796 - DNA, 23 bp, Homo sapiens
tttctgaactatttactgtgagg

SEQ ID NO: 8797 - DNA, 23 bp, Homo sapiens
taaaacttctgtgacggtaaggg

SEQ ID NO: 8798 - DNA, 23 bp, Homo sapiens
gcagatgtcatcaggagccaagg

SEQ ID NO: 8799 - DNA, 23 bp, Homo sapiens
ctattttctatatctttgtgggg

SEQ ID NO: 8800 - DNA, 23 bp, Homo sapiens
ggcaataatgaatggtccatagg

SEQ ID NO: 8801 - DNA, 23 bp, Homo sapiens
catagcctaccttaatctgtggg

SEQ ID NO: 8802 - DNA, 23 bp, Homo sapiens
accctgcaacctgatcttggagg

SEQ ID NO: 8803 - DNA, 23 bp, Homo sapiens
tagtggacctggtaaacactggg

SEQ ID NO: 8804 - DNA, 23 bp, Homo sapiens
ctgcaaagcctgacactgcatgg

SEQ ID NO: 8805 - DNA, 23 bp, Homo sapiens
gcacagtcttgggtcacacaggg

SEQ ID NO: 8806 - DNA, 23 bp, Homo sapiens
acaaagatatagaaaatagtggg

SEQ ID NO: 8807 - DNA, 23 bp, Homo sapiens
aacagaagatatctaagtagagg

SEQ ID NO: 8808 - DNA, 23 bp, Homo sapiens
attggcttactcctcttaagggg

SEQ ID NO: 8809 - DNA, 23 bp, Homo sapiens
tggtatgtaacattacatacagg

SEQ ID NO: 8810 - DNA, 23 bp, Homo sapiens
tgataacaaccccaatacttcgg

SEQ ID NO: 8811 - DNA, 23 bp, Homo sapiens
gctaatcacccagaaaactctgg

SEQ ID NO: 8812 - DNA, 23 bp, Homo sapiens
gtgagtagtggtccattgcaagg

SEQ ID NO: 8813 - DNA, 23 bp, Homo sapiens
tatcctcatacactaatgccagg

SEQ ID NO: 8814 - DNA, 23 bp, Homo sapiens
gatgtcagcatacttcgtgttgg

SEQ ID NO: 8815 - DNA, 23 bp, Homo sapiens
actgccaactgccaaagaatggg

SEQ ID NO: 8816 - DNA, 23 bp, Homo sapiens
aaagagcatcagtaaagtgcagg

SEQ ID NO: 8817 - DNA, 23 bp, Homo sapiens
cagtgcagcttgatcgcacaagg

SEQ ID NO: 8818 - DNA, 23 bp, Homo sapiens
tgaagctgtagaaaccctactgg

SEQ ID NO: 8819 - DNA, 23 bp, Homo sapiens
ctacagcttcacagatgctgagg

SEQ ID NO: 8820 - DNA, 23 bp, Homo sapiens
atattagttgtaaaatacactgg

SEQ ID NO: 8821 - DNA, 23 bp, Homo sapiens
ttgcagttattttttcacaatgg

SEQ ID NO: 8822 - DNA, 23 bp, Homo sapiens
gagagctgtcatcccacccccgg

SEQ ID NO: 8823 - DNA, 23 bp, Homo sapiens
tatgttgatatcataccccatgg

SEQ ID NO: 8824 - DNA, 23 bp, Homo sapiens
ttttggggtagggaccagaatgg

SEQ ID NO: 8825 - DNA, 23 bp, Homo sapiens
gctactgcttaatcacccatggg

SEQ ID NO: 8826 - DNA, 23 bp, Homo sapiens
tgccacttgtgaggacccaaggg

SEQ ID NO: 8827 - DNA, 23 bp, Homo sapiens
gggtagggaccagaatggctggg

SEQ ID NO: 8828 - DNA, 23 bp, Homo sapiens
tatttttctatcaagtgacgtgg

SEQ ID NO: 8829 - DNA, 23 bp, Homo sapiens
gagtggggaggttaacctctggg

SEQ ID NO: 8830 - DNA, 23 bp, Homo sapiens
aattacacaactttatgttgagg

SEQ ID NO: 8831 - DNA, 23 bp, Homo sapiens
tttttatgtcaatctcagctagg

SEQ ID NO: 8832 - DNA, 23 bp, Homo sapiens
taatatttttcaactatccgagg

SEQ ID NO: 8833 - DNA, 23 bp, Homo sapiens
gtaataagttgctttcaaagagg

SEQ ID NO: 8834 - DNA, 23 bp, Homo sapiens
ttagcatttccattctctagtgg

SEQ ID NO: 8835 - DNA, 23 bp, Homo sapiens
atcacacctccacaatccttagg

SEQ ID NO: 8836 - DNA, 23 bp, Homo sapiens
agtaggtaaactaggccagtagg

SEQ ID NO: 8837 - DNA, 23 bp, Homo sapiens
tgcacagtcttgggtcacacagg

SEQ ID NO: 8838 - DNA, 23 bp, Homo sapiens
ttttgcctatacctactgtcagg

SEQ ID NO: 8839 - DNA, 23 bp, Homo sapiens
ttatagtgtgaaattatggaggg

SEQ ID NO: 8840 - DNA, 23 bp, Homo sapiens
ctattggactaataagaagtagg

SEQ ID NO: 8841 - DNA, 23 bp, Homo sapiens
tctgattgcaatgttcctcatgg

SEQ ID NO: 8842 - DNA, 23 bp, Homo sapiens
aatggcagacatcccttgaaggg

SEQ ID NO: 8843 - DNA, 23 bp, Homo sapiens
acctccaagatcaggttgcaggg

SEQ ID NO: 8844 - DNA, 23 bp, Homo sapiens
aggaaataatggcttccgactgg

SEQ ID NO: 8845 - DNA, 23 bp, Homo sapiens
atgagtctcgaagtttattgtgg

SEQ ID NO: 8846 - DNA, 23 bp, Homo sapiens
gtgtggatgctgcatactattgg

SEQ ID NO: 8847 - DNA, 23 bp, Homo sapiens
gccagtaactgtgaattctaggg

SEQ ID NO: 8848 - DNA, 23 bp, Homo sapiens
gtgatagtttgaataaaagccgg

SEQ ID NO: 8849 - DNA, 23 bp, Homo sapiens
attatagtgtgaaattatggagg

SEQ ID NO: 8850 - DNA, 23 bp, Homo sapiens
ctttactgaagggcatacttggg

SEQ ID NO: 8851 - DNA, 23 bp, Homo sapiens
aatcctctccagtttgcctaagg

SEQ ID NO: 8852 - DNA, 23 bp, Homo sapiens
ttctctctctacctaagacaggg

SEQ ID NO: 8853 - DNA, 23 bp, Homo sapiens
tgaaataactagtaatgaagagg

SEQ ID NO: 8854 - DNA, 23 bp, Homo sapiens
atcatcaccacgatcacagcagg

SEQ ID NO: 8855 - DNA, 23 bp, Homo sapiens
tttttatttgtaatttctggggg

SEQ ID NO: 8856 - DNA, 23 bp, Homo sapiens
tttgtcctccaatgtctatgagg

SEQ ID NO: 8857 - DNA, 23 bp, Homo sapiens
agaggaagaagcaaaattgaagg

SEQ ID NO: 8858 - DNA, 23 bp, Homo sapiens
ttaatgctgtggaatacacttgg

SEQ ID NO: 8859 - DNA, 23 bp, Homo sapiens
tgcctcacttcattctccaatgg

SEQ ID NO: 8860 - DNA, 23 bp, Homo sapiens
agtattataaatctttaccttgg

SEQ ID NO: 8861 - DNA, 23 bp, Homo sapiens
aatgtattcaaatccacagttgg

SEQ ID NO: 8862 - DNA, 23 bp, Homo sapiens
gcaaatagtagtccatatgctgg

SEQ ID NO: 8863 - DNA, 23 bp, Homo sapiens
ggaaagaaggtgctgtaaagagg

SEQ ID NO: 8864 - DNA, 23 bp, Homo sapiens
tagcatttccattctctagtggg

SEQ ID NO: 8865 - DNA, 23 bp, Homo sapiens
attttgtcctataggaaggaagg

SEQ ID NO: 8866 - DNA, 23 bp, Homo sapiens
atttgactctggaaataagatgg

SEQ ID NO: 8867 - DNA, 23 bp, Homo sapiens
taatcgctaaaccaaggcttagg

SEQ ID NO: 8868 - DNA, 23 bp, Homo sapiens
ctgaggcaattagaaaaggctgg

SEQ ID NO: 8869 - DNA, 23 bp, Homo sapiens
ccagatgcacagaggtaacatgg

SEQ ID NO: 8870 - DNA, 23 bp, Homo sapiens
ttattgtaaacactctcaaaagg

SEQ ID NO: 8871 - DNA, 23 bp, Homo sapiens
gatacatgacatgctctccttgg

SEQ ID NO: 8872 - DNA, 23 bp, Homo sapiens
atattgacttaataaaaaagagg

SEQ ID NO: 8873 - DNA, 23 bp, Homo sapiens
cccttccttactttactgaaggg

SEQ ID NO: 8874 - DNA, 23 bp, Homo sapiens
tccaagttgaagctaatcattgg

SEQ ID NO: 8875 - DNA, 23 bp, Homo sapiens
gttttgtaattgaccagtatcgg

SEQ ID NO: 8876 - DNA, 23 bp, Homo sapiens
gactgccaactgccaaagaatgg

SEQ ID NO: 8877 - DNA, 23 bp, Homo sapiens
agatgagatatccatttaagtgg

SEQ ID NO: 8878 - DNA, 23 bp, Homo sapiens
cttcaagtcgtcatttagacggg

SEQ ID NO: 8879 - DNA, 23 bp, Homo sapiens
ccctaaaccttccttcctatagg

SEQ ID NO: 8880 - DNA, 23 bp, Homo sapiens
atacttcgtgttgggaaagaagg

SEQ ID NO: 8881 - DNA, 23 bp, Homo sapiens
gaataattattaagaaggcaagg

SEQ ID NO: 8882 - DNA, 23 bp, Homo sapiens
tttgaataatgtttttcaagagg

SEQ ID NO: 8883 - DNA, 23 bp, Homo sapiens
gtatgctgacatcttgggctagg

SEQ ID NO: 8884 - DNA, 23 bp, Homo sapiens
ccttcaagtcgtcatttagacgg

SEQ ID NO: 8885 - DNA, 23 bp, Homo sapiens
gtatgcccttcagtaaagtaagg

SEQ ID NO: 8886 - DNA, 23 bp, Homo sapiens
ctgttttcaaacttgttctgagg

SEQ ID NO: 8887 - DNA, 23 bp, Homo sapiens
taatagatggagtaaattagtgg

SEQ ID NO: 8888 - DNA, 23 bp, Homo sapiens
ctattaggaccatcaaatacagg

SEQ ID NO: 8889 - DNA, 23 bp, Homo sapiens
ttggtaatctaattatctgtcgg

SEQ ID NO: 8890 - DNA, 23 bp, Homo sapiens
gcaatagagagccgagggagtgg

SEQ ID NO: 8891 - DNA, 23 bp, Homo sapiens
agcttgatcgcacaaggtgcagg

SEQ ID NO: 8892 - DNA, 23 bp, Homo sapiens
tcaaaaattccccccttcaaggg

SEQ ID NO: 8893 - DNA, 23 bp, Homo sapiens
ataaggtacatgtaagatagagg

SEQ ID NO: 8894 - DNA, 23 bp, Homo sapiens
catttaaatcatataaacattgg

SEQ ID NO: 8895 - DNA, 23 bp, Homo sapiens
ttttgttagaaccccttaagagg

SEQ ID NO: 8896 - DNA, 23 bp, Homo sapiens
atccccatcccactagagaatgg

SEQ ID NO: 8897 - DNA, 23 bp, Homo sapiens
tgctactgcttaatcacccatgg

SEQ ID NO: 8898 - DNA, 23 bp, Homo sapiens
attgaggtaatgtttaagtccgg

SEQ ID NO: 8899 - DNA, 23 bp, Homo sapiens
ccagacaacatgacttgttaggg

SEQ ID NO: 8900 - DNA, 23 bp, Homo sapiens
tcatttctagttgttggatgggg

SEQ ID NO: 8901 - DNA, 23 bp, Homo sapiens
tgtgagctctttaggaagacagg

SEQ ID NO: 8902 - DNA, 23 bp, Homo sapiens
ctggttgtagagcttaccgctgg

SEQ ID NO: 8903 - DNA, 23 bp, Homo sapiens
gcatatctaatgagtttccttgg

SEQ ID NO: 8904 - DNA, 23 bp, Homo sapiens
aatttaaagtccaaaggcctagg

SEQ ID NO: 8905 - DNA, 23 bp, Homo sapiens
ccaatacttcggaccagctatgg

SEQ ID NO: 8906 - DNA, 23 bp, Homo sapiens
tggaagtgcaagaagacaactgg

SEQ ID NO: 8907 - DNA, 23 bp, Homo sapiens
tttctcacattccattaagtagg

SEQ ID NO: 8908 - DNA, 23 bp, Homo sapiens
atgaacataaaggaattcaatgg

SEQ ID NO: 8909 - DNA, 23 bp, Homo sapiens
tgataacgtgacattcggttagg

SEQ ID NO: 8910 - DNA, 23 bp, Homo sapiens
cctctggttcagccttgcaatgg

SEQ ID NO: 8911 - DNA, 23 bp, Homo sapiens
ggttggggatttttggggtaggg

SEQ ID NO: 8912 - DNA, 23 bp, Homo sapiens
ttattctaattccactccctcgg

SEQ ID NO: 8913 - DNA, 23 bp, Homo sapiens
aactcattagatatgctagaagg

SEQ ID NO: 8914 - DNA, 23 bp, Homo sapiens
atagatgataacgtgacattcgg

SEQ ID NO: 8915 - DNA, 23 bp, Homo sapiens
ctgtaagtggaggtgaagtcagg

SEQ ID NO: 8916 - DNA, 23 bp, Homo sapiens
attatttcctgcctaagccttgg

SEQ ID NO: 8917 - DNA, 23 bp, Homo sapiens
ttattcaaactatcacagatagg

SEQ ID NO: 8918 - DNA, 23 bp, Homo sapiens
atagttttgatatttctgattgg

SEQ ID NO: 8919 - DNA, 23 bp, Homo sapiens
ctattattcaagttgcatctagg

SEQ ID NO: 8920 - DNA, 23 bp, Homo sapiens
ttatcccatgtccctgatgctgg

SEQ ID NO: 8921 - DNA, 23 bp, Homo sapiens
agtgacattttaatgtttggagg

SEQ ID NO: 8922 - DNA, 23 bp, Homo sapiens
tcagaatcctttccaacaatggg

SEQ ID NO: 8923 - DNA, 23 bp, Homo sapiens
cctcacaagtggcaaatacctgg

SEQ ID NO: 8924 - DNA, 23 bp, Homo sapiens
attgctagattgctaaacttagg

SEQ ID NO: 8925 - DNA, 23 bp, Homo sapiens
caaaagctataccagctagaagg

SEQ ID NO: 8926 - DNA, 23 bp, Homo sapiens
gttcagcaaagcttacataatgg

SEQ ID NO: 8927 - DNA, 23 bp, Homo sapiens
aattagaataaagtagtataggg

SEQ ID NO: 8928 - DNA, 23 bp, Homo sapiens
gatatattcatatttgtccttgg

SEQ ID NO: 8929 - DNA, 23 bp, Homo sapiens
cagaaactctgttagaatgtagg

SEQ ID NO: 8930 - DNA, 23 bp, Homo sapiens
attcgttgcagtaaatactttgg

SEQ ID NO: 8931 - DNA, 23 bp, Homo sapiens
tctccagtcacaaatgagtttgg

SEQ ID NO: 8932 - DNA, 23 bp, Homo sapiens
acaattatcagaaaagttgatgg

SEQ ID NO: 8933 - DNA, 23 bp, Homo sapiens
atcttaatatcgataatagatgg

SEQ ID NO: 8934 - DNA, 23 bp, Homo sapiens
tctcatgctaactttctgaatgg

SEQ ID NO: 8935 - DNA, 23 bp, Homo sapiens
tttctctctctacctaagacagg

SEQ ID NO: 8936 - DNA, 23 bp, Homo sapiens
tagaaattatagcatagctttgg

SEQ ID NO: 8937 - DNA, 23 bp, Homo sapiens
tatggtgtatcattaaatatagg

SEQ ID NO: 8938 - DNA, 23 bp, Homo sapiens
aatcaggaagattgatttgaggg

SEQ ID NO: 8939 - DNA, 23 bp, Homo sapiens
tgataaacgttataaatcttggg

SEQ ID NO: 8940 - DNA, 23 bp, Homo sapiens
atatggatggaggacaaaaatgg

SEQ ID NO: 8941 - DNA, 23 bp, Homo sapiens
cttcatttctagttgttggatgg

SEQ ID NO: 8942 - DNA, 23 bp, Homo sapiens
cagaagatactcgatcaatatgg

SEQ ID NO: 8943 - DNA, 23 bp, Homo sapiens
ccagtttgcctaaggaataaggg

SEQ ID NO: 8944 - DNA, 23 bp, Homo sapiens
agattactagtaaacaaaaatgg

SEQ ID NO: 8945 - DNA, 23 bp, Homo sapiens
cctataggaaggaaggtttaggg

SEQ ID NO: 8946 - DNA, 23 bp, Homo sapiens
tgtgaaataaaatcacaattagg

SEQ ID NO: 8947 - DNA, 23 bp, Homo sapiens
atatggaaacactaataatatgg

SEQ ID NO: 8948 - DNA, 23 bp, Homo sapiens
gtaaagtgcaggtgaattatagg

SEQ ID NO: 8949 - DNA, 23 bp, Homo sapiens
cattctcatgaccatgataatgg

SEQ ID NO: 8950 - DNA, 23 bp, Homo sapiens
aattggatgcgaagtataattgg

SEQ ID NO: 8951 - DNA, 23 bp, Homo sapiens
gctttcaaagaggtcataatagg

SEQ ID NO: 8952 - DNA, 23 bp, Homo sapiens
ttatcacattagaatttaatagg

SEQ ID NO: 8953 - DNA, 23 bp, Homo sapiens
ccaaagatggtttaaataaaggg

SEQ ID NO: 8954 - DNA, 23 bp, Homo sapiens
ttaagaagactaacaagttttgg

SEQ ID NO: 8955 - DNA, 23 bp, Homo sapiens
aaaattgtactgatgaaaattgg

SEQ ID NO: 8956 - DNA, 23 bp, Homo sapiens
atacattacctccttttattagg

SEQ ID NO: 8957 - DNA, 23 bp, Homo sapiens
agtttttgcttccacttaaatgg

SEQ ID NO: 8958 - DNA, 23 bp, Homo sapiens
ggagtgtaaagcgaaatccaggg

SEQ ID NO: 8959 - DNA, 23 bp, Homo sapiens
agatcttagaggactcctggggg

SEQ ID NO: 8960 - DNA, 23 bp, Homo sapiens
agaaatacaattattcacagagg

SEQ ID NO: 8961 - DNA, 23 bp, Homo sapiens
taaacacaggaataaattagggg

SEQ ID NO: 8962 - DNA, 23 bp, Homo sapiens
tctacagttttggcacactgagg

SEQ ID NO: 8963 - DNA, 23 bp, Homo sapiens
aaaccctcattatagcacatggg

SEQ ID NO: 8964 - DNA, 23 bp, Homo sapiens
atacttaggaaataaagacatgg

SEQ ID NO: 8965 - DNA, 23 bp, Homo sapiens
ttatgggatctggagcacccagg

SEQ ID NO: 8966 - DNA, 23 bp, Homo sapiens
tgtactatactgaatgctggagg

SEQ ID NO: 8967 - DNA, 23 bp, Homo sapiens
aataaataaataatgcctggagg

SEQ ID NO: 8968 - DNA, 23 bp, Homo sapiens
tagatcttagaggactcctgggg

SEQ ID NO: 8969 - DNA, 23 bp, Homo sapiens
aagcaattgatcctatatggtgg

SEQ ID NO: 8970 - DNA, 23 bp, Homo sapiens
actcctaagctaccaaatggggg

SEQ ID NO: 8971 - DNA, 23 bp, Homo sapiens
tattttgtaatgatgaacagggg

SEQ ID NO: 8972 - DNA, 23 bp, Homo sapiens
tgggtattcaatgaagtcggagg

SEQ ID NO: 8973 - DNA, 23 bp, Homo sapiens
tgatgaacaggggtaaacacagg

SEQ ID NO: 8974 - DNA, 23 bp, Homo sapiens
tcatagatgaatttatacaacgg

SEQ ID NO: 8975 - DNA, 23 bp, Homo sapiens
tatagagtatatattcacatcgg

SEQ ID NO: 8976 - DNA, 23 bp, Homo sapiens
aataaaggccttgatcattgggg

SEQ ID NO: 8977 - DNA, 23 bp, Homo sapiens
tgtgatatattttttcacagggg

SEQ ID NO: 8978 - DNA, 23 bp, Homo sapiens
taggtgactgagtttctaagagg

SEQ ID NO: 8979 - DNA, 23 bp, Homo sapiens
taacaagcatcatattccaaggg

SEQ ID NO: 8980 - DNA, 23 bp, Homo sapiens
ggatttaagcctgatcatggagg

SEQ ID NO: 8981 - DNA, 23 bp, Homo sapiens
gtggcatgatgctattgaggagg

SEQ ID NO: 8982 - DNA, 23 bp, Homo sapiens
tgacagcctcacttaataggggg

SEQ ID NO: 8983 - DNA, 23 bp, Homo sapiens
tgttgaaatgaagatagcaaagg

SEQ ID NO: 8984 - DNA, 23 bp, Homo sapiens
gaagacactgacctctccaatgg

SEQ ID NO: 8985 - DNA, 23 bp, Homo sapiens
cccaagagtgagtctttctgggg

SEQ ID NO: 8986 - DNA, 23 bp, Homo sapiens
gatttaagcctgatcatggaggg

SEQ ID NO: 8987 - DNA, 23 bp, Homo sapiens
tgtactcaccgtaagtccagagg

SEQ ID NO: 8988 - DNA, 23 bp, Homo sapiens
catggctaactttctgacaaggg

SEQ ID NO: 8989 - DNA, 23 bp, Homo sapiens
agggttcagttgagaccaagtgg

SEQ ID NO: 8990 - DNA, 23 bp, Homo sapiens
taacttccagtgtaggccaaggg

SEQ ID NO: 8991 - DNA, 23 bp, Homo sapiens
tctgtgataaccatcagatgagg

SEQ ID NO: 8992 - DNA, 23 bp, Homo sapiens
aatgtgccacatcggaaaagcgg

SEQ ID NO: 8993 - DNA, 23 bp, Homo sapiens
acaccagagataacatcaccagg

SEQ ID NO: 8994 - DNA, 23 bp, Homo sapiens
acacagtaacacagatgacatgg

SEQ ID NO: 8995 - DNA, 23 bp, Homo sapiens
ctatatgcagaatgtatgggtgg

SEQ ID NO: 8996 - DNA, 23 bp, Homo sapiens
ttgtggatgagaacaacgcaggg

SEQ ID NO: 8997 - DNA, 23 bp, Homo sapiens
gccacatcggaaaagcggtacgg

SEQ ID NO: 8998 - DNA, 23 bp, Homo sapiens
gtactcaccgtaagtccagaggg

SEQ ID NO: 8999 - DNA, 23 bp, Homo sapiens
caatgtctatgaaggatgagtgg

SEQ ID NO: 9000 - DNA, 23 bp, Homo sapiens
aaaaatgctttctggcagcgagg

SEQ ID NO: 9001 - DNA, 23 bp, Homo sapiens
tttgtggatgagaacaacgcagg

SEQ ID NO: 9002 - DNA, 23 bp, Homo sapiens
gttcaaactacctcatctgatgg

SEQ ID NO: 9003 - DNA, 23 bp, Homo sapiens
caataataaatagtgtaacaggg

SEQ ID NO: 9004 - DNA, 23 bp, Homo sapiens
aggctcctgctcaattcatgagg

SEQ ID NO: 9005 - DNA, 23 bp, Homo sapiens
agtttggtgatgcagcagatggg

SEQ ID NO: 9006 - DNA, 23 bp, Homo sapiens
ttctgatgttcagtgttacgtgg

SEQ ID NO: 9007 - DNA, 23 bp, Homo sapiens
ttattttgtaatgatgaacaggg

SEQ ID NO: 9008 - DNA, 23 bp, Homo sapiens
tcatttccccctattaagtgagg

SEQ ID NO: 9009 - DNA, 23 bp, Homo sapiens
gctgttcatcatgaattggaagg

SEQ ID NO: 9010 - DNA, 23 bp, Homo sapiens
tccttcatagacattgctgtagg

SEQ ID NO: 9011 - DNA, 23 bp, Homo sapiens
gttttccccaaacccccacatgg

SEQ ID NO: 9012 - DNA, 23 bp, Homo sapiens
gcacccatgtgctataatgaggg

SEQ ID NO: 9013 - DNA, 23 bp, Homo sapiens
cagtgcttagatttggtaggtgg

SEQ ID NO: 9014 - DNA, 23 bp, Homo sapiens
gcatgggcagacatatgtcatgg

SEQ ID NO: 9015 - DNA, 23 bp, Homo sapiens
aaggatttccctcgaaggagtgg

SEQ ID NO: 9016 - DNA, 23 bp, Homo sapiens
gagaagcaaatgtgccacatcgg

SEQ ID NO: 9017 - DNA, 23 bp, Homo sapiens
tgtgcatagatgcataaccttgg

SEQ ID NO: 9018 - DNA, 23 bp, Homo sapiens
agctaagtacggataacctaggg

SEQ ID NO: 9019 - DNA, 23 bp, Homo sapiens
tattcaaactctatggcaggtgg

SEQ ID NO: 9020 - DNA, 23 bp, Homo sapiens
aggaggctgctctagaaccaagg

SEQ ID NO: 9021 - DNA, 23 bp, Homo sapiens
gaggtcagtgtcttctcatgagg

SEQ ID NO: 9022 - DNA, 23 bp, Homo sapiens
ctgggggtcaataatagtaaggg

SEQ ID NO: 9023 - DNA, 23 bp, Homo sapiens
gggtcaataatagtaagggctgg

SEQ ID NO: 9024 - DNA, 23 bp, Homo sapiens
acgtaacactgaacatcagaagg

SEQ ID NO: 9025 - DNA, 23 bp, Homo sapiens
tgttgggtattcaatgaagtcgg

SEQ ID NO: 9026 - DNA, 23 bp, Homo sapiens
taatctttgtgcaatcaggaagg

SEQ ID NO: 9027 - DNA, 23 bp, Homo sapiens
catatcattcaggccagcaaggg

SEQ ID NO: 9028 - DNA, 23 bp, Homo sapiens
actcactctcatatttagcaagg

SEQ ID NO: 9029 - DNA, 23 bp, Homo sapiens
aagggcataaagaggccagaagg

SEQ ID NO: 9030 - DNA, 23 bp, Homo sapiens
ggatttcttgggaaatgatgggg

SEQ ID NO: 9031 - DNA, 23 bp, Homo sapiens
ccatagctgagtctatgctatgg

SEQ ID NO: 9032 - DNA, 23 bp, Homo sapiens
gacagtgccataggatcaagtgg

SEQ ID NO: 9033 - DNA, 23 bp, Homo sapiens
tagagcctagcccagtgtagagg

SEQ ID NO: 9034 - DNA, 23 bp, Homo sapiens
tagctaagtacggataacctagg

SEQ ID NO: 9035 - DNA, 23 bp, Homo sapiens
gcacgtttgccagaaagtaacgg

SEQ ID NO: 9036 - DNA, 23 bp, Homo sapiens
gtaacttccagtgtaggccaagg

SEQ ID NO: 9037 - DNA, 23 bp, Homo sapiens
ttttttcacaggggaatgagagg

SEQ ID NO: 9038 - DNA, 23 bp, Homo sapiens
gtgacagcctcacttaatagggg

SEQ ID NO: 9039 - DNA, 23 bp, Homo sapiens
tggaagggaacttattaggatgg

SEQ ID NO: 9040 - DNA, 23 bp, Homo sapiens
ttatcacagaaaaatttgcatgg

SEQ ID NO: 9041 - DNA, 23 bp, Homo sapiens
ctatattctgacttcagtgaagg

SEQ ID NO: 9042 - DNA, 23 bp, Homo sapiens
gggtatcctgtaaattcgatggg

SEQ ID NO: 9043 - DNA, 23 bp, Homo sapiens
ttattgggagagagttggggtgg

SEQ ID NO: 9044 - DNA, 23 bp, Homo sapiens
gcatcatgccactccttcgaggg

SEQ ID NO: 9045 - DNA, 23 bp, Homo sapiens
tataagctctggaatgtcaaagg

SEQ ID NO: 9046 - DNA, 23 bp, Homo sapiens
ttaatggttatgatggtaagggg

SEQ ID NO: 9047 - DNA, 23 bp, Homo sapiens
aatgcttctcaatagcctgaagg

SEQ ID NO: 9048 - DNA, 23 bp, Homo sapiens
aatggtaatgaaatttaactagg

SEQ ID NO: 9049 - DNA, 23 bp, Homo sapiens
agagcagagaaacaggaggccgg

SEQ ID NO: 9050 - DNA, 23 bp, Homo sapiens
attcttgccatattgatcaaggg

SEQ ID NO: 9051 - DNA, 23 bp, Homo sapiens
aatgttagcatagctaagtacgg

SEQ ID NO: 9052 - DNA, 23 bp, Homo sapiens
ccatagcatagactcagctatgg

SEQ ID NO: 9053 - DNA, 23 bp, Homo sapiens
tatcacagaaaaatttgcatggg

SEQ ID NO: 9054 - DNA, 23 bp, Homo sapiens
gcgttctgtgttgtttctagggg

SEQ ID NO: 9055 - DNA, 23 bp, Homo sapiens
tagctgtaagacaaaagctatgg

SEQ ID NO: 9056 - DNA, 23 bp, Homo sapiens
tgattatcctcctgctcagacgg

SEQ ID NO: 9057 - DNA, 23 bp, Homo sapiens
gttatgaacagaatttctagtgg

SEQ ID NO: 9058 - DNA, 23 bp, Homo sapiens
ctacatatggaaaaggacatagg

SEQ ID NO: 9059 - DNA, 23 bp, Homo sapiens
aaatcagaacaactaagtaatgg

SEQ ID NO: 9060 - DNA, 23 bp, Homo sapiens
agtcagaatgtattagatgaggg

SEQ ID NO: 9061 - DNA, 23 bp, Homo sapiens
gcatggattgtagaaagagtagg

SEQ ID NO: 9062 - DNA, 23 bp, Homo sapiens
gcctttctaacttacaaatgtgg

SEQ ID NO: 9063 - DNA, 23 bp, Homo sapiens
aatctcagtgtaagaatgcaagg

SEQ ID NO: 9064 - DNA, 23 bp, Homo sapiens
ttaaattctgctcagatcagagg

SEQ ID NO: 9065 - DNA, 23 bp, Homo sapiens
gattgtagaaagagtaggaaagg

SEQ ID NO: 9066 - DNA, 23 bp, Homo sapiens
tttgttacataacacaagagtgg

SEQ ID NO: 9067 - DNA, 23 bp, Homo sapiens
tatagtgttctaaaatgttgagg

SEQ ID NO: 9068 - DNA, 23 bp, Homo sapiens
gtcatagcagaaaattggcttgg

SEQ ID NO: 9069 - DNA, 23 bp, Homo sapiens
tcctttaaacaccattggagagg

SEQ ID NO: 9070 - DNA, 23 bp, Homo sapiens
tcaaccttatattttaacacggg

SEQ ID NO: 9071 - DNA, 23 bp, Homo sapiens
ttaattcaagacatctggacagg

SEQ ID NO: 9072 - DNA, 23 bp, Homo sapiens
gcaaatctactccagcactctgg

SEQ ID NO: 9073 - DNA, 23 bp, Homo sapiens
ccttctaccacctctacactggg

SEQ ID NO: 9074 - DNA, 23 bp, Homo sapiens
acttccttcatagctgccctagg

SEQ ID NO: 9075 - DNA, 23 bp, Homo sapiens
atataggcttatgataagaatgg

SEQ ID NO: 9076 - DNA, 23 bp, Homo sapiens
aaacatagagtaagcagtagtgg

SEQ ID NO: 9077 - DNA, 23 bp, Homo sapiens
ttaacaagcatcatattccaagg

SEQ ID NO: 9078 - DNA, 23 bp, Homo sapiens
ataaaactctttttgccatgagg

SEQ ID NO: 9079 - DNA, 23 bp, Homo sapiens
aatgttaagaaaggtacagcagg

SEQ ID NO: 9080 - DNA, 23 bp, Homo sapiens
ataaatagtgatgctcaaaaggg

SEQ ID NO: 9081 - DNA, 23 bp, Homo sapiens
atagaaaacaaaaacaaggatgg

SEQ ID NO: 9082 - DNA, 23 bp, Homo sapiens
gtagaaggaatggggcatagagg

SEQ ID NO: 9083 - DNA, 23 bp, Homo sapiens
gtacaaggaaataaaggagtggg

SEQ ID NO: 9084 - DNA, 23 bp, Homo sapiens
ctgcatgtaacttccagtgtagg

SEQ ID NO: 9085 - DNA, 23 bp, Homo sapiens
gcttcgaaaataagaagcctagg

SEQ ID NO: 9086 - DNA, 23 bp, Homo sapiens
catggaattatgtaaggctaggg

SEQ ID NO: 9087 - DNA, 23 bp, Homo sapiens
gtaaaataagaatatgggcatgg

SEQ ID NO: 9088 - DNA, 23 bp, Homo sapiens
aagaagtgtaagaaaaacattgg

SEQ ID NO: 9089 - DNA, 23 bp, Homo sapiens
agatgggagttgcttttgtgggg

SEQ ID NO: 9090 - DNA, 23 bp, Homo sapiens
tttcttatccaaaattatgaggg

SEQ ID NO: 9091 - DNA, 23 bp, Homo sapiens
ctttcattaagcacttatgaggg

SEQ ID NO: 9092 - DNA, 23 bp, Homo sapiens
gtacagtgcttagatttggtagg

SEQ ID NO: 9093 - DNA, 23 bp, Homo sapiens
tgacatttgacaacaaacattgg

SEQ ID NO: 9094 - DNA, 23 bp, Homo sapiens
acacatgtaaaataatacttagg

SEQ ID NO: 9095 - DNA, 23 bp, Homo sapiens
aatctaacacaagaaccctctgg

SEQ ID NO: 9096 - DNA, 23 bp, Homo sapiens
cttggtctcaactgaaccctagg

SEQ ID NO: 9097 - DNA, 23 bp, Homo sapiens
agtaccggcaattagctgttggg

SEQ ID NO: 9098 - DNA, 23 bp, Homo sapiens
atgcttctcaatagcctgaaggg

SEQ ID NO: 9099 - DNA, 23 bp, Homo sapiens
ttactattaatgaaagctcaagg

SEQ ID NO: 9100 - DNA, 23 bp, Homo sapiens
gatgagtggtttctcccaaatgg

SEQ ID NO: 9101 - DNA, 23 bp, Homo sapiens
tgatgttgacaaagaatgaaagg

SEQ ID NO: 9102 - DNA, 23 bp, Homo sapiens
tacactacattaataaaagtagg

SEQ ID NO: 9103 - DNA, 23 bp, Homo sapiens
ccatttggtagcttaggagttgg

SEQ ID NO: 9104 - DNA, 23 bp, Homo sapiens
tttaatggttatgatggtaaggg

SEQ ID NO: 9105 - DNA, 23 bp, Homo sapiens
ttaatgttacatctcactgttgg

SEQ ID NO: 9106 - DNA, 23 bp, Homo sapiens
ctctctctctctcaactggaggg

SEQ ID NO: 9107 - DNA, 23 bp, Homo sapiens
ctaatagacatcataagtgcagg

SEQ ID NO: 9108 - DNA, 23 bp, Homo sapiens
tttcctgatggcatagcagacgg

SEQ ID NO: 9109 - DNA, 23 bp, Homo sapiens
acttatgatgtctattagaaagg

SEQ ID NO: 9110 - DNA, 23 bp, Homo sapiens
gaatatcaaaagcttttctaggg

SEQ ID NO: 9111 - DNA, 23 bp, Homo sapiens
gagaagacaaatgttaagaaagg

SEQ ID NO: 9112 - DNA, 23 bp, Homo sapiens
gctctctctctctcaactggagg

SEQ ID NO: 9113 - DNA, 23 bp, Homo sapiens
aggccggaaaacatgttaagagg

SEQ ID NO: 9114 - DNA, 23 bp, Homo sapiens
ctagatcttagaggactcctggg

SEQ ID NO: 9115 - DNA, 23 bp, Homo sapiens
tatgaactatgcaacgttcaggg

SEQ ID NO: 9116 - DNA, 23 bp, Homo sapiens
aagtttggtgatgcagcagatgg

SEQ ID NO: 9117 - DNA, 23 bp, Homo sapiens
cacttatgagggcaaaagacagg

SEQ ID NO: 9118 - DNA, 23 bp, Homo sapiens
gttaagtttgacagtgccatagg

SEQ ID NO: 9119 - DNA, 23 bp, Homo sapiens
gcttctgtatattctgtgacagg

SEQ ID NO: 9120 - DNA, 23 bp, Homo sapiens
agaggaaaaagagactataaggg

SEQ ID NO: 9121 - DNA, 23 bp, Homo sapiens
atctagacattcccaatcctggg

SEQ ID NO: 9122 - DNA, 23 bp, Homo sapiens
ttaaagaactacaggagtaatgg

SEQ ID NO: 9123 - DNA, 23 bp, Homo sapiens
ccccagaaagactcactcttggg

SEQ ID NO: 9124 - DNA, 23 bp, Homo sapiens
gacagtccctaatcacgaaatgg

SEQ ID NO: 9125 - DNA, 23 bp, Homo sapiens
taagagttggattcattccatgg

SEQ ID NO: 9126 - DNA, 23 bp, Homo sapiens
tttatttaaagggcataaagagg

SEQ ID NO: 9127 - DNA, 23 bp, Homo sapiens
aagagtggagaaacaagtttggg

SEQ ID NO: 9128 - DNA, 23 bp, Homo sapiens
tcatctgtgttactgtgtatagg

SEQ ID NO: 9129 - DNA, 23 bp, Homo sapiens
ctattaagatatttgcatatggg

SEQ ID NO: 9130 - DNA, 23 bp, Homo sapiens
ataaatagtgtaacagggtaagg

SEQ ID NO: 9131 - DNA, 23 bp, Homo sapiens
tcataacagaaatattaaacagg

SEQ ID NO: 9132 - DNA, 23 bp, Homo sapiens
gtgctcaaatagttaaaagtagg

SEQ ID NO: 9133 - DNA, 23 bp, Homo sapiens
ctatgtccttttccatatgtagg

SEQ ID NO: 9134 - DNA, 23 bp, Homo sapiens
aatacccaacagctaattgccgg

SEQ ID NO: 9135 - DNA, 23 bp, Homo sapiens
aggaaaggcaagagaattgaggg

SEQ ID NO: 9136 - DNA, 23 bp, Homo sapiens
gtagaggtggtagaaggaatggg

SEQ ID NO: 9137 - DNA, 23 bp, Homo sapiens
gctctagtctctaggatctcagg

SEQ ID NO: 9138 - DNA, 23 bp, Homo sapiens
agtctttcagaacccccatttgg

SEQ ID NO: 9139 - DNA, 23 bp, Homo sapiens
ttaaaaaatacagcatagctagg

SEQ ID NO: 9140 - DNA, 23 bp, Homo sapiens
gtggccagtgtatcataagttgg

SEQ ID NO: 9141 - DNA, 23 bp, Homo sapiens
tgaaatgatttgctctcaaatgg

SEQ ID NO: 9142 - DNA, 23 bp, Homo sapiens
gtaaccaagaaaagttcaattgg

SEQ ID NO: 9143 - DNA, 23 bp, Homo sapiens
gggaatgcaacagagatagaagg

SEQ ID NO: 9144 - DNA, 23 bp, Homo sapiens
ctttaccttacctaattgccagg

SEQ ID NO: 9145 - DNA, 23 bp, Homo sapiens
catttttgtgtacttctctaggg

SEQ ID NO: 9146 - DNA, 23 bp, Homo sapiens
ccaactcctaagctaccaaatgg

SEQ ID NO: 9147 - DNA, 23 bp, Homo sapiens
ttaaataaataaataatgcctgg

SEQ ID NO: 9148 - DNA, 23 bp, Homo sapiens
cctggaagacagacttcataggg

SEQ ID NO: 9149 - DNA, 23 bp, Homo sapiens
gactcagctatggaaagaacagg

SEQ ID NO: 9150 - DNA, 23 bp, Homo sapiens
gagcacctgaagaagaagttagg

SEQ ID NO: 9151 - DNA, 23 bp, Homo sapiens
ttacctggtgatgttatctctgg

SEQ ID NO: 9152 - DNA, 23 bp, Homo sapiens
aatttcatagtcattagaaatgg

SEQ ID NO: 9153 - DNA, 23 bp, Homo sapiens
gtctaaatctctcaaaagaatgg

SEQ ID NO: 9154 - DNA, 23 bp, Homo sapiens
ttaaaagactcaataagagttgg

SEQ ID NO: 9155 - DNA, 23 bp, Homo sapiens
gataatttcaattaaaacgttgg

SEQ ID NO: 9156 - DNA, 23 bp, Homo sapiens
attgggaatgtctagatagaagg

SEQ ID NO: 9157 - DNA, 23 bp, Homo sapiens
gtaactatatgcagaatgtatgg

SEQ ID NO: 9158 - DNA, 23 bp, Homo sapiens
tcttttggagctcttctccctgg

SEQ ID NO: 9159 - DNA, 23 bp, Homo sapiens
tgacaacaaaaattgtaaacagg

SEQ ID NO: 9160 - DNA, 23 bp, Homo sapiens
tttacatgtgttctaagaaaggg

SEQ ID NO: 9161 - DNA, 23 bp, Homo sapiens
cctgggggtcaataatagtaagg

SEQ ID NO: 9162 - DNA, 23 bp, Homo sapiens
ggctcttgtccatgtcaagttgg

SEQ ID NO: 9163 - DNA, 23 bp, Homo sapiens
ttttttcctttaaacaccattgg

SEQ ID NO: 9164 - DNA, 23 bp, Homo sapiens
aactcagtaaattagaaataggg

SEQ ID NO: 9165 - DNA, 23 bp, Homo sapiens
cctgtagttctttaaaatagagg

SEQ ID NO: 9166 - DNA, 23 bp, Homo sapiens
gtaacagggtaaggtcttatggg

SEQ ID NO: 9167 - DNA, 23 bp, Homo sapiens
attattttgacataaatgattgg

SEQ ID NO: 9168 - DNA, 23 bp, Homo sapiens
ttacatgtaaaaatgaaaactgg

SEQ ID NO: 9169 - DNA, 23 bp, Homo sapiens
gggcaattgggacttgagattgg

SEQ ID NO: 9170 - DNA, 23 bp, Homo sapiens
attattctggttttatcctaggg

SEQ ID NO: 9171 - DNA, 23 bp, Homo sapiens
gttttaggttaataaaaaatggg

SEQ ID NO: 9172 - DNA, 23 bp, Homo sapiens
ataatttcaattaaaacgttggg

SEQ ID NO: 9173 - DNA, 23 bp, Homo sapiens
tacaagacatcgtaaatgattgg

SEQ ID NO: 9174 - DNA, 23 bp, Homo sapiens
acttcaacttccaaaagtattgg

SEQ ID NO: 9175 - DNA, 23 bp, Homo sapiens
tggaatgtcaaaggcatgatagg

SEQ ID NO: 9176 - DNA, 23 bp, Homo sapiens
cccagtgtagaggtggtagaagg

SEQ ID NO: 9177 - DNA, 23 bp, Homo sapiens
catctcacaactctctttagtgg

SEQ ID NO: 9178 - DNA, 23 bp, Homo sapiens
ggatcaagtggtgcttttagtgg

SEQ ID NO: 9179 - DNA, 23 bp, Homo sapiens
tcttaggtattcaaactctatgg

SEQ ID NO: 9180 - DNA, 23 bp, Homo sapiens
tgacattccagagcttataatgg

SEQ ID NO: 9181 - DNA, 23 bp, Homo sapiens
gcttgtacagtgcttagatttgg

SEQ ID NO: 9182 - DNA, 23 bp, Homo sapiens
gccacatttgtaagttagaaagg

SEQ ID NO: 9183 - DNA, 23 bp, Homo sapiens
tgtgacagcctcacttaataggg

SEQ ID NO: 9184 - DNA, 23 bp, Homo sapiens
tcaagactctgtcatcttagagg

SEQ ID NO: 9185 - DNA, 23 bp, Homo sapiens
catttgaagtctgagaaaatagg

SEQ ID NO: 9186 - DNA, 23 bp, Homo sapiens
gtatttattgagtccccttcagg

SEQ ID NO: 9187 - DNA, 23 bp, Homo sapiens
taaataagtctctagttaaaggg

SEQ ID NO: 9188 - DNA, 23 bp, Homo sapiens
ggtagtactctcttattcattgg

SEQ ID NO: 9189 - DNA, 23 bp, Homo sapiens
gtaaacacaggaataaattaggg

SEQ ID NO: 9190 - DNA, 23 bp, Homo sapiens
atataaacccttgatcaatatgg

SEQ ID NO: 9191 - DNA, 23 bp, Homo sapiens
cttgttaatagaattcttatggg

SEQ ID NO: 9192 - DNA, 23 bp, Homo sapiens
tgagcgtcatagcagaaaattgg

SEQ ID NO: 9193 - DNA, 23 bp, Homo sapiens
ttattcatggattcctagtttgg

SEQ ID NO: 9194 - DNA, 23 bp, Homo sapiens
tcttaaatgctagatcttagagg

SEQ ID NO: 9195 - DNA, 23 bp, Homo sapiens
tttccatgaagatctatttacgg

SEQ ID NO: 9196 - DNA, 23 bp, Homo sapiens
agattggtaattaagaaaatagg

SEQ ID NO: 9197 - DNA, 23 bp, Homo sapiens
gtttaatttctcatgaataatgg

SEQ ID NO: 9198 - DNA, 23 bp, Homo sapiens
gcttctcccatcgaatttacagg

SEQ ID NO: 9199 - DNA, 23 bp, Homo sapiens
ttaaatgtgtccaatacttttgg

SEQ ID NO: 9200 - DNA, 23 bp, Homo sapiens
tatacaacggagatttatattgg

SEQ ID NO: 9201 - DNA, 23 bp, Homo sapiens
ttaatgtagtgtaaataaattgg

SEQ ID NO: 9202 - DNA, 23 bp, Homo sapiens
ttttgccatgaggccaaaaatgg

SEQ ID NO: 9203 - DNA, 23 bp, Homo sapiens
agtgcttaatgaaagtttaatgg

SEQ ID NO: 9204 - DNA, 23 bp, Homo sapiens
ggacatttcccgttactttctgg

SEQ ID NO: 9205 - DNA, 23 bp, Homo sapiens
gtataacatatggtacagggcgg

SEQ ID NO: 9206 - DNA, 23 bp, Homo sapiens
ccatgctcagatccacaacgggg

SEQ ID NO: 9207 - DNA, 23 bp, Homo sapiens
agatgtattgaaggtctgtgtgg

SEQ ID NO: 9208 - DNA, 23 bp, Homo sapiens
cccaccatacaaaattacagggg

SEQ ID NO: 9209 - DNA, 23 bp, Homo sapiens
ggaatgcttagaaagagatgtgg

SEQ ID NO: 9210 - DNA, 23 bp, Homo sapiens
cacacaatgcatcagcaacgggg

SEQ ID NO: 9211 - DNA, 23 bp, Homo sapiens
caataaacagtatcacgcagagg

SEQ ID NO: 9212 - DNA, 23 bp, Homo sapiens
atgtgtattaacccacctagagg

SEQ ID NO: 9213 - DNA, 23 bp, Homo sapiens
tttagctgtcacttccaaagggg

SEQ ID NO: 9214 - DNA, 23 bp, Homo sapiens
caaggagctcagagtctgcgagg

SEQ ID NO: 9215 - DNA, 23 bp, Homo sapiens
agtcgtctgtttaaacccggtgg

SEQ ID NO: 9216 - DNA, 23 bp, Homo sapiens
tgctcagatccacaacggggagg

SEQ ID NO: 9217 - DNA, 23 bp, Homo sapiens
gtgtaacatgagtatcacacagg

SEQ ID NO: 9218 - DNA, 23 bp, Homo sapiens
gaaggcagtagccattaaagggg

SEQ ID NO: 9219 - DNA, 23 bp, Homo sapiens
tctgttgaaatgccatccagagg

SEQ ID NO: 9220 - DNA, 23 bp, Homo sapiens
aggtttatagctatgtcctgagg

SEQ ID NO: 9221 - DNA, 23 bp, Homo sapiens
gatacaatagtaactaactgcgg

SEQ ID NO: 9222 - DNA, 23 bp, Homo sapiens
actgtataacatatggtacaggg

SEQ ID NO: 9223 - DNA, 23 bp, Homo sapiens
caggcgtatatccactaaggcgg

SEQ ID NO: 9224 - DNA, 23 bp, Homo sapiens
aacgcaacagatgattcctgagg

SEQ ID NO: 9225 - DNA, 23 bp, Homo sapiens
gagttggcatgagacatagaggg

SEQ ID NO: 9226 - DNA, 23 bp, Homo sapiens
gaaaatctgacaagcctgggagg

SEQ ID NO: 9227 - DNA, 23 bp, Homo sapiens
atagcaactcaaccaaacaaagg

SEQ ID NO: 9228 - DNA, 23 bp, Homo sapiens
cagtccgtagaactcacagatgg

SEQ ID NO: 9229 - DNA, 23 bp, Homo sapiens
tgtggtgatgagggatgccaggg

SEQ ID NO: 9230 - DNA, 23 bp, Homo sapiens
tttacgtgctgaaaattctgggg

SEQ ID NO: 9231 - DNA, 23 bp, Homo sapiens
tgacatgtgaattaaatgggagg

SEQ ID NO: 9232 - DNA, 23 bp, Homo sapiens
cggggctttatgaaagagggagg

SEQ ID NO: 9233 - DNA, 23 bp, Homo sapiens
cccgttgctgatgcattgtgtgg

SEQ ID NO: 9234 - DNA, 23 bp, Homo sapiens
ctagaattataatatacccaggg

SEQ ID NO: 9235 - DNA, 23 bp, Homo sapiens
tggtaaagaggtacagatggggg

SEQ ID NO: 9236 - DNA, 23 bp, Homo sapiens
cagtgatgcgagatacccacagg

SEQ ID NO: 9237 - DNA, 23 bp, Homo sapiens
aatggtaaatcaagagagcgtgg

SEQ ID NO: 9238 - DNA, 23 bp, Homo sapiens
gtccatgctcagatccacaacgg

SEQ ID NO: 9239 - DNA, 23 bp, Homo sapiens
ttaatctaatctgcttcacaagg

SEQ ID NO: 9240 - DNA, 23 bp, Homo sapiens
cctggctccagtaaattcaaggg

SEQ ID NO: 9241 - DNA, 23 bp, Homo sapiens
aatctgcagtaacattgctgagg

SEQ ID NO: 9242 - DNA, 23 bp, Homo sapiens
aagattgaagacaaaagaggagg

SEQ ID NO: 9243 - DNA, 23 bp, Homo sapiens
atgtacgctagaagttggaaggg

SEQ ID NO: 9244 - DNA, 23 bp, Homo sapiens
ctactgtcgttatcaataggtgg

SEQ ID NO: 9245 - DNA, 23 bp, Homo sapiens
aatagtaactaactgcggatggg

SEQ ID NO: 9246 - DNA, 23 bp, Homo sapiens
atctgcagtaacattgctgaggg

SEQ ID NO: 9247 - DNA, 23 bp, Homo sapiens
actcacagatggttgtatggtgg

SEQ ID NO: 9248 - DNA, 23 bp, Homo sapiens
tccattatgaggcagaaatgtgg

SEQ ID NO: 9249 - DNA, 23 bp, Homo sapiens
tacacgcatgggtaaacagaagg

SEQ ID NO: 9250 - DNA, 23 bp, Homo sapiens
ttgggactgaaggaactgatggg

SEQ ID NO: 9251 - DNA, 23 bp, Homo sapiens
caacggggctttatgaaagaggg

SEQ ID NO: 9252 - DNA, 23 bp, Homo sapiens
gttctaagacaaaagttgggtgg

SEQ ID NO: 9253 - DNA, 23 bp, Homo sapiens
attgtgatggtgaaaaaggaagg

SEQ ID NO: 9254 - DNA, 23 bp, Homo sapiens
tgttaaacaagagtatgtatggg

SEQ ID NO: 9255 - DNA, 23 bp, Homo sapiens
atcccaattgaacagactggtgg

SEQ ID NO: 9256 - DNA, 23 bp, Homo sapiens
ttacctgacatgcactgacaggg

SEQ ID NO: 9257 - DNA, 23 bp, Homo sapiens
tgaagttctctacagaatgaggg

SEQ ID NO: 9258 - DNA, 23 bp, Homo sapiens
tgtttaatactggactgagaggg

SEQ ID NO: 9259 - DNA, 23 bp, Homo sapiens
agagttggcatgagacatagagg

SEQ ID NO: 9260 - DNA, 23 bp, Homo sapiens
tgtgttaatatcctctaggtggg

SEQ ID NO: 9261 - DNA, 23 bp, Homo sapiens
ataatggtattcattcagtaggg

SEQ ID NO: 9262 - DNA, 23 bp, Homo sapiens
tgagaaccaagccatacccttgg

SEQ ID NO: 9263 - DNA, 23 bp, Homo sapiens
tcatattgttgtacgtgccaagg

SEQ ID NO: 9264 - DNA, 23 bp, Homo sapiens
caagctaccaaggaatgcctggg

SEQ ID NO: 9265 - DNA, 23 bp, Homo sapiens
taagctcgcacatttcctgtggg

SEQ ID NO: 9266 - DNA, 23 bp, Homo sapiens
cagcattaaaaggaatcaagtgg

SEQ ID NO: 9267 - DNA, 23 bp, Homo sapiens
ttccaacttctagcgtacatagg

SEQ ID NO: 9268 - DNA, 23 bp, Homo sapiens
atacttaagatttacctcccagg

SEQ ID NO: 9269 - DNA, 23 bp, Homo sapiens
gtaagaaattggataaaatgggg

SEQ ID NO: 9270 - DNA, 23 bp, Homo sapiens
atggcatcacaaaaatgtatggg

SEQ ID NO: 9271 - DNA, 23 bp, Homo sapiens
caaagaggtcgtaacatacaggg

SEQ ID NO: 9272 - DNA, 23 bp, Homo sapiens
actgaatagtgtttagccaaggg

SEQ ID NO: 9273 - DNA, 23 bp, Homo sapiens
taaagtatagaactcaagcatgg

SEQ ID NO: 9274 - DNA, 23 bp, Homo sapiens
tctaagacaaaagttgggtgggg

SEQ ID NO: 9275 - DNA, 23 bp, Homo sapiens
ggtttctaatcctaatacagtgg

SEQ ID NO: 9276 - DNA, 23 bp, Homo sapiens
accacacaatgcatcagcaacgg

SEQ ID NO: 9277 - DNA, 23 bp, Homo sapiens
ctataaagtgcatcataatgagg

SEQ ID NO: 9278 - DNA, 23 bp, Homo sapiens
gttaaaataacaaagccacttgg

SEQ ID NO: 9279 - DNA, 23 bp, Homo sapiens
ttttcaatataattcatccaagg

SEQ ID NO: 9280 - DNA, 23 bp, Homo sapiens
ctgtttctaataaagaaagaagg

SEQ ID NO: 9281 - DNA, 23 bp, Homo sapiens
gaggaaacctcaagctaccaagg

SEQ ID NO: 9282 - DNA, 23 bp, Homo sapiens
ttccattaaccactcctacaggg

SEQ ID NO: 9283 - DNA, 23 bp, Homo sapiens
ggtatcccaattgaacagactgg

SEQ ID NO: 9284 - DNA, 23 bp, Homo sapiens
cagagtcgtctgtttaaacccgg

SEQ ID NO: 9285 - DNA, 23 bp, Homo sapiens
aagagacaagcaatatgaagtgg

SEQ ID NO: 9286 - DNA, 23 bp, Homo sapiens
tccattaaccactcctacagggg

SEQ ID NO: 9287 - DNA, 23 bp, Homo sapiens
cttccttattggactaaatgggg

SEQ ID NO: 9288 - DNA, 23 bp, Homo sapiens
taaccacacaagcatcaccttgg

SEQ ID NO: 9289 - DNA, 23 bp, Homo sapiens
acctctttaccaaagacagctgg

SEQ ID NO: 9290 - DNA, 23 bp, Homo sapiens
tttgagtgattccagagctgagg

SEQ ID NO: 9291 - DNA, 23 bp, Homo sapiens
cattattgctaaaagctcaaggg

SEQ ID NO: 9292 - DNA, 23 bp, Homo sapiens
taagcttgtaaccccataggtgg

SEQ ID NO: 9293 - DNA, 23 bp, Homo sapiens
ttaagctcgcacatttcctgtgg

SEQ ID NO: 9294 - DNA, 23 bp, Homo sapiens
gatgagggatgccagggcgaagg

SEQ ID NO: 9295 - DNA, 23 bp, Homo sapiens
gcggaaacaattatgtgccatgg

SEQ ID NO: 9296 - DNA, 23 bp, Homo sapiens
ggacgagaagatggtacagaagg

SEQ ID NO: 9297 - DNA, 23 bp, Homo sapiens
agcttgtatgaatcaaatgcagg

SEQ ID NO: 9298 - DNA, 23 bp, Homo sapiens
gggtcagctaatgatgaaatggg

SEQ ID NO: 9299 - DNA, 23 bp, Homo sapiens
cgagaagatggtacagaaggagg

SEQ ID NO: 9300 - DNA, 23 bp, Homo sapiens
ggatcagattattaaacatgagg

SEQ ID NO: 9301 - DNA, 23 bp, Homo sapiens
tttggtaaagaggtacagatggg

SEQ ID NO: 9302 - DNA, 23 bp, Homo sapiens
ccttgaatttactggagccaggg

SEQ ID NO: 9303 - DNA, 23 bp, Homo sapiens
acccaccatacaaaattacaggg

SEQ ID NO: 9304 - DNA, 23 bp, Homo sapiens
gcatctggatatctcactgtagg

SEQ ID NO: 9305 - DNA, 23 bp, Homo sapiens
tgccagggcgaaggaagagaagg

SEQ ID NO: 9306 - DNA, 23 bp, Homo sapiens
acaagtctatagagactggtagg

SEQ ID NO: 9307 - DNA, 23 bp, Homo sapiens
gtgcaagacattaacctcaaagg

SEQ ID NO: 9308 - DNA, 23 bp, Homo sapiens
agaaataagggattttcagaggg

SEQ ID NO: 9309 - DNA, 23 bp, Homo sapiens
ttgagtgattccagagctgaggg

SEQ ID NO: 9310 - DNA, 23 bp, Homo sapiens
tcaaagaaaagttatagcaaggg

SEQ ID NO: 9311 - DNA, 23 bp, Homo sapiens
atttttagagttctaactcaggg

SEQ ID NO: 9312 - DNA, 23 bp, Homo sapiens
gtttgaagaaaaccaaagacagg

SEQ ID NO: 9313 - DNA, 23 bp, Homo sapiens
atagtgtttagccaagggtatgg

SEQ ID NO: 9314 - DNA, 23 bp, Homo sapiens
acgtaaatcagatactagaaagg

SEQ ID NO: 9315 - DNA, 23 bp, Homo sapiens
gataccagaaaataaagagcagg

SEQ ID NO: 9316 - DNA, 23 bp, Homo sapiens
ctttacaattttaaacaacaggg

SEQ ID NO: 9317 - DNA, 23 bp, Homo sapiens
aattggctgatccaatggaatgg

SEQ ID NO: 9318 - DNA, 23 bp, Homo sapiens
gttgtgtagcacaaattagaagg

SEQ ID NO: 9319 - DNA, 23 bp, Homo sapiens
ctttctctatgagtgttcgtggg

SEQ ID NO: 9320 - DNA, 23 bp, Homo sapiens
cctagtcacttagaaataggtgg

SEQ ID NO: 9321 - DNA, 23 bp, Homo sapiens
tatgtacgctagaagttggaagg

SEQ ID NO: 9322 - DNA, 23 bp, Homo sapiens
ttaaaaaaaaatacacgcatggg

SEQ ID NO: 9323 - DNA, 23 bp, Homo sapiens
atggttctaagacaaaagttggg

SEQ ID NO: 9324 - DNA, 23 bp, Homo sapiens
ctaagatctaaatcatacattgg

SEQ ID NO: 9325 - DNA, 23 bp, Homo sapiens
tttttttttctctagagaagagg

SEQ ID NO: 9326 - DNA, 23 bp, Homo sapiens
ctcttaacgccaatactgatggg

SEQ ID NO: 9327 - DNA, 23 bp, Homo sapiens
gcaacggggctttatgaaagagg

SEQ ID NO: 9328 - DNA, 23 bp, Homo sapiens
agatctaaatcatacattggagg

SEQ ID NO: 9329 - DNA, 23 bp, Homo sapiens
agtatcacacaggttacaaaggg

SEQ ID NO: 9330 - DNA, 23 bp, Homo sapiens
actattggctggaattgtcgtgg

SEQ ID NO: 9331 - DNA, 23 bp, Homo sapiens
tatgtactaatgcaattgagtgg

SEQ ID NO: 9332 - DNA, 23 bp, Homo sapiens
tactgaatagtgtttagccaagg

SEQ ID NO: 9333 - DNA, 23 bp, Homo sapiens
ccaggtattgggagatcgatggg

SEQ ID NO: 9334 - DNA, 23 bp, Homo sapiens
ttttaagcttgtaaccccatagg

SEQ ID NO: 9335 - DNA, 23 bp, Homo sapiens
gaattagtttgagatacaaaggg

SEQ ID NO: 9336 - DNA, 23 bp, Homo sapiens
aaaattccttgagttcagacagg

SEQ ID NO: 9337 - DNA, 23 bp, Homo sapiens
ccccgttgtggatctgagcatgg

SEQ ID NO: 9338 - DNA, 23 bp, Homo sapiens
acaaccatctgtgagttctacgg

SEQ ID NO: 9339 - DNA, 23 bp, Homo sapiens
ttacatttatatctatagatggg

SEQ ID NO: 9340 - DNA, 23 bp, Homo sapiens
ttgtgatgctttctatgcaaagg

SEQ ID NO: 9341 - DNA, 23 bp, Homo sapiens
gccttagtggatatacgcctggg

SEQ ID NO: 9342 - DNA, 23 bp, Homo sapiens
attttcttctacaatccaaatgg

SEQ ID NO: 9343 - DNA, 23 bp, Homo sapiens
gacactacagagctatatagagg

SEQ ID NO: 9344 - DNA, 23 bp, Homo sapiens
actcagagaaggatcttagcagg

SEQ ID NO: 9345 - DNA, 23 bp, Homo sapiens
ggtataaaacgataaggaagagg

SEQ ID NO: 9346 - DNA, 23 bp, Homo sapiens
aaattctgagatgtactaatggg

SEQ ID NO: 9347 - DNA, 23 bp, Homo sapiens
tcttctacaatccaaatggtagg

SEQ ID NO: 9348 - DNA, 23 bp, Homo sapiens
aagaagattgaagacaaaagagg

SEQ ID NO: 9349 - DNA, 23 bp, Homo sapiens
aagactatatccctcagctctgg

SEQ ID NO: 9350 - DNA, 23 bp, Homo sapiens
gaggaaaatctgacaagcctggg

SEQ ID NO: 9351 - DNA, 23 bp, Homo sapiens
ttaaaaaataactaatcataggg

SEQ ID NO: 9352 - DNA, 23 bp, Homo sapiens
ggaaatataagcaagtatgctgg

SEQ ID NO: 9353 - DNA, 23 bp, Homo sapiens
tgaattagtttgagatacaaagg

SEQ ID NO: 9354 - DNA, 23 bp, Homo sapiens
ttttagctgtcacttccaaaggg

SEQ ID NO: 9355 - DNA, 23 bp, Homo sapiens
gccagctgtctttggtaaagagg

SEQ ID NO: 9356 - DNA, 23 bp, Homo sapiens
ttatatggcagaaattctcctgg

SEQ ID NO: 9357 - DNA, 23 bp, Homo sapiens
tgtgtaaagtgtgcccctgtagg

SEQ ID NO: 9358 - DNA, 23 bp, Homo sapiens
attgaaagatccaaaaaagatgg

SEQ ID NO: 9359 - DNA, 23 bp, Homo sapiens
gggaagcaggggttgaagggagg

SEQ ID NO: 9360 - DNA, 23 bp, Homo sapiens
gtttagccaagggtatggcttgg

SEQ ID NO: 9361 - DNA, 23 bp, Homo sapiens
ttagaatttgtgatttcttgtgg

SEQ ID NO: 9362 - DNA, 23 bp, Homo sapiens
tagatctgcatcatcacgtcagg

SEQ ID NO: 9363 - DNA, 23 bp, Homo sapiens
acctctttgcacataccaccggg

SEQ ID NO: 9364 - DNA, 23 bp, Homo sapiens
ctgggtatattataattctaggg

SEQ ID NO: 9365 - DNA, 23 bp, Homo sapiens
cctgggaatgtgatgaatgctgg

SEQ ID NO: 9366 - DNA, 23 bp, Homo sapiens
tgaaggaattgtggtgatgaggg

SEQ ID NO: 9367 - DNA, 23 bp, Homo sapiens
agaagaagaggacgagaagatgg

SEQ ID NO: 9368 - DNA, 23 bp, Homo sapiens
gactctgagctccttgaggtggg

SEQ ID NO: 9369 - DNA, 23 bp, Homo sapiens
ctgcgaggtataaaacgataagg

SEQ ID NO: 9370 - DNA, 23 bp, Homo sapiens
ttttccaaagaagactctaaagg

SEQ ID NO: 9371 - DNA, 23 bp, Homo sapiens
tcttcttcactggagttgatggg

SEQ ID NO: 9372 - DNA, 23 bp, Homo sapiens
ctaatgcaatcgagtgtgacagg

SEQ ID NO: 9373 - DNA, 23 bp, Homo sapiens
aggaagagaaggcgtgagatggg

SEQ ID NO: 9374 - DNA, 23 bp, Homo sapiens
atcctttttgagcctctggatgg

SEQ ID NO: 9375 - DNA, 23 bp, Homo sapiens
gctgggaagcaggggttgaaggg

SEQ ID NO: 9376 - DNA, 23 bp, Homo sapiens
tttgcaattctttaacgggttgg

SEQ ID NO: 9377 - DNA, 23 bp, Homo sapiens
caatttgtagaaatactttgtgg

SEQ ID NO: 9378 - DNA, 23 bp, Homo sapiens
tatcagaagcagacagaagttgg

SEQ ID NO: 9379 - DNA, 23 bp, Homo sapiens
tttgggactgaaggaactgatgg

SEQ ID NO: 9380 - DNA, 23 bp, Homo sapiens
gccccagctaaatcctcaaatgg

SEQ ID NO: 9381 - DNA, 23 bp, Homo sapiens
gcatcactgtttgagcgctatgg

SEQ ID NO: 9382 - DNA, 23 bp, Homo sapiens
aatggaatggaatgaatttgagg

SEQ ID NO: 9383 - DNA, 23 bp, Homo sapiens
ccagcattcatcacattcccagg

SEQ ID NO: 9384 - DNA, 23 bp, Homo sapiens
aggcattccttggtagcttgagg

SEQ ID NO: 9385 - DNA, 23 bp, Homo sapiens
aaacaaatacagaagagtatagg

SEQ ID NO: 9386 - DNA, 23 bp, Homo sapiens
tttcaattaagagtcttttgagg

SEQ ID NO: 9387 - DNA, 23 bp, Homo sapiens
ttaaataaggctgggaagcaggg

SEQ ID NO: 9388 - DNA, 23 bp, Homo sapiens
tattttcaagaaggaaaacctgg

SEQ ID NO: 9389 - DNA, 23 bp, Homo sapiens
taaaccttctaagttaatatggg

SEQ ID NO: 9390 - DNA, 23 bp, Homo sapiens
gcttaaagaaaactttcctcagg

SEQ ID NO: 9391 - DNA, 23 bp, Homo sapiens
tcaacagaattttagtgcaatgg

SEQ ID NO: 9392 - DNA, 23 bp, Homo sapiens
aatgtcatctgatataaagttgg

SEQ ID NO: 9393 - DNA, 23 bp, Homo sapiens
tccatgctcagatccacaacggg

SEQ ID NO: 9394 - DNA, 23 bp, Homo sapiens
aatgagcaaatgttaaagaatgg

SEQ ID NO: 9395 - DNA, 23 bp, Homo sapiens
aatagaagttatttatgaagagg

SEQ ID NO: 9396 - DNA, 23 bp, Homo sapiens
ataaaaataattataaagaatgg

SEQ ID NO: 9397 - DNA, 23 bp, Homo sapiens
gcagacatttttctaaggcatgg

SEQ ID NO: 9398 - DNA, 23 bp, Homo sapiens
atctagactagtatctaaaaggg

SEQ ID NO: 9399 - DNA, 23 bp, Homo sapiens
ggaaggcagtagccattaaaggg

SEQ ID NO: 9400 - DNA, 23 bp, Homo sapiens
caagtattctattttcaagaagg

SEQ ID NO: 9401 - DNA, 23 bp, Homo sapiens
atagccattcaggcaatgatagg

SEQ ID NO: 9402 - DNA, 23 bp, Homo sapiens
tagcagagaagtgtattataggg

SEQ ID NO: 9403 - DNA, 23 bp, Homo sapiens
atatgacatgtgaattaaatggg

SEQ ID NO: 9404 - DNA, 23 bp, Homo sapiens
ctcctatgtacgctagaagttgg

SEQ ID NO: 9405 - DNA, 23 bp, Homo sapiens
tgggaggtaaatcttaagtatgg

SEQ ID NO: 9406 - DNA, 23 bp, Homo sapiens
atctctgtttcaaagtcaaatgg

SEQ ID NO: 9407 - DNA, 23 bp, Homo sapiens
gcatcatcacgtcaggtagatgg

SEQ ID NO: 9408 - DNA, 23 bp, Homo sapiens
aattatacatttccacctatggg

SEQ ID NO: 9409 - DNA, 23 bp, Homo sapiens
tatggcatcacaaaaatgtatgg

SEQ ID NO: 9410 - DNA, 23 bp, Homo sapiens
gatataaagaacactttaagtgg

SEQ ID NO: 9411 - DNA, 23 bp, Homo sapiens
tacatgcagatatatcctattgg

SEQ ID NO: 9412 - DNA, 23 bp, Homo sapiens
caacagggccatattccaatagg

SEQ ID NO: 9413 - DNA, 23 bp, Homo sapiens
atccagatgccgaatccctttgg

SEQ ID NO: 9414 - DNA, 23 bp, Homo sapiens
caaagacatctactaaatatcgg

SEQ ID NO: 9415 - DNA, 23 bp, Homo sapiens
attccattaaccactcctacagg

SEQ ID NO: 9416 - DNA, 23 bp, Homo sapiens
actctaaaaatacttccaatagg

SEQ ID NO: 9417 - DNA, 23 bp, Homo sapiens
gaataacatacctaaaaataggg

SEQ ID NO: 9418 - DNA, 23 bp, Homo sapiens
cgccttctcttccttcgccctgg

SEQ ID NO: 9419 - DNA, 23 bp, Homo sapiens
tcccctgtaattttgtatggtgg

SEQ ID NO: 9420 - DNA, 23 bp, Homo sapiens
gtaaaaggtgtattttccttagg

SEQ ID NO: 9421 - DNA, 23 bp, Homo sapiens
tttagagtcttctttggaaaagg

SEQ ID NO: 9422 - DNA, 23 bp, Homo sapiens
ctactactgtcgttatcaatagg

SEQ ID NO: 9423 - DNA, 23 bp, Homo sapiens
gcccctgtaggagtggttaatgg

SEQ ID NO: 9424 - DNA, 23 bp, Homo sapiens
gcgtagagagtctgtttcatagg

SEQ ID NO: 9425 - DNA, 23 bp, Homo sapiens
ttatgattcagctaatatctagg

SEQ ID NO: 9426 - DNA, 23 bp, Homo sapiens
gatggttctaagacaaaagttgg

SEQ ID NO: 9427 - DNA, 23 bp, Homo sapiens
gatgggcactcaacactaatagg

SEQ ID NO: 9428 - DNA, 23 bp, Homo sapiens
gttttctgacttaaaacaatagg

SEQ ID NO: 9429 - DNA, 23 bp, Homo sapiens
tgccatccagaggctcaaaaagg

SEQ ID NO: 9430 - DNA, 23 bp, Homo sapiens
aatgagaattgcctaccatttgg

SEQ ID NO: 9431 - DNA, 23 bp, Homo sapiens
tcttccttattggactaaatggg

SEQ ID NO: 9432 - DNA, 23 bp, Homo sapiens
atttcccctgtaattttgtatgg

SEQ ID NO: 9433 - DNA, 23 bp, Homo sapiens
actgcttcgtaataattagatgg

SEQ ID NO: 9434 - DNA, 23 bp, Homo sapiens
atgcttctactagataagattgg

SEQ ID NO: 9435 - DNA, 23 bp, Homo sapiens
atatccaaccgtctgttcatagg

SEQ ID NO: 9436 - DNA, 23 bp, Homo sapiens
tgtgagactttgtaattcattgg

SEQ ID NO: 9437 - DNA, 23 bp, Homo sapiens
aattacaaagtctcacaaaatgg

SEQ ID NO: 9438 - DNA, 23 bp, Homo sapiens
taaaatggcacgtaacaaaatgg

SEQ ID NO: 9439 - DNA, 23 bp, Homo sapiens
acacagtgaaacattttagaagg

SEQ ID NO: 9440 - DNA, 23 bp, Homo sapiens
tcagtgcatgtcaggtaaaatgg

SEQ ID NO: 9441 - DNA, 23 bp, Homo sapiens
aagatttttttgacttaaaaggg

SEQ ID NO: 9442 - DNA, 23 bp, Homo sapiens
tctcctagtcacttagaaatagg

SEQ ID NO: 9443 - DNA, 23 bp, Homo sapiens
gagagaaagaatctaattatcgg

SEQ ID NO: 9444 - DNA, 23 bp, Homo sapiens
tgttctttatatccaaataatgg

SEQ ID NO: 9445 - DNA, 23 bp, Homo sapiens
gccacatttctgcctcataatgg

SEQ ID NO: 9446 - DNA, 23 bp, Homo sapiens
ctgagtttctatttacgtatagg

SEQ ID NO: 9447 - DNA, 23 bp, Homo sapiens
tgaagcaccatactataaaatgg

SEQ ID NO: 9448 - DNA, 23 bp, Homo sapiens
tattataccactatataaaatgg

SEQ ID NO: 9449 - DNA, 23 bp, Homo sapiens
gtggagtgcaagaaaataaaagg

SEQ ID NO: 9450 - DNA, 23 bp, Homo sapiens
ttgcagtgagaacaagtaaaagg

SEQ ID NO: 9451 - DNA, 23 bp, Homo sapiens
aatattgctaagcaataaatagg

SEQ ID NO: 9452 - DNA, 23 bp, Homo sapiens
tatatagtcttcagttttagagg

SEQ ID NO: 9453 - DNA, 23 bp, Homo sapiens
actcaagcatggattcttttggg

SEQ ID NO: 9454 - DNA, 23 bp, Homo sapiens
gagaatttctgccatataaaagg

SEQ ID NO: 9455 - DNA, 23 bp, Homo sapiens
tcactgctgttattctttgcagg

SEQ ID NO: 9456 - DNA, 23 bp, Homo sapiens
agtcttgtccttaactttagagg

SEQ ID NO: 9457 - DNA, 23 bp, Homo sapiens
agttagacttttattctttaggg

SEQ ID NO: 9458 - DNA, 23 bp, Homo sapiens
gttagacaagtgtaagaaattgg

SEQ ID NO: 9459 - DNA, 23 bp, Homo sapiens
tcactgttggtcaaaataattgg

SEQ ID NO: 9460 - DNA, 23 bp, Homo sapiens
ctagctgtaaaagacacgggggg

SEQ ID NO: 9461 - DNA, 23 bp, Homo sapiens
actagctgtaaaagacacggggg

SEQ ID NO: 9462 - DNA, 23 bp, Homo sapiens
aactagctgtaaaagacacgggg

SEQ ID NO: 9463 - DNA, 23 bp, Homo sapiens
gaaactagctgtaaaagacacgg

SEQ ID NO: 9464 - DNA, 23 bp, Homo sapiens
tgcagtgcctttttagtgcatgg

SEQ ID NO: 9465 - DNA, 23 bp, Homo sapiens
gtaaatgtatttctgctgtgggg

SEQ ID NO: 9466 - DNA, 23 bp, Homo sapiens
agagctctagaaaattcaggtgg

SEQ ID NO: 9467 - DNA, 23 bp, Homo sapiens
gcgtattcctgatgagagtgagg

SEQ ID NO: 9468 - DNA, 23 bp, Homo sapiens
ggaagatgtttgatggtacgagg

SEQ ID NO: 9469 - DNA, 23 bp, Homo sapiens
ccctcagttaataatcctggggg

SEQ ID NO: 9470 - DNA, 23 bp, Homo sapiens
agagcatttttatggccctgagg

SEQ ID NO: 9471 - DNA, 23 bp, Homo sapiens
tagtgaaaactggtgacagatgg

SEQ ID NO: 9472 - DNA, 23 bp, Homo sapiens
gctggggaaggacagctctgggg

SEQ ID NO: 9473 - DNA, 23 bp, Homo sapiens
tgaaccgaatgttaaaactgtgg

SEQ ID NO: 9474 - DNA, 23 bp, Homo sapiens
tcgagatcaagaaaaaacacagg

SEQ ID NO: 9475 - DNA, 23 bp, Homo sapiens
tcatttgtttaggtaccatgagg

SEQ ID NO: 9476 - DNA, 23 bp, Homo sapiens
caagcaggacacaatcccatggg

SEQ ID NO: 9477 - DNA, 23 bp, Homo sapiens
ggaatgtagacctacctccaagg

SEQ ID NO: 9478 - DNA, 23 bp, Homo sapiens
acactaagacatccagactcagg

SEQ ID NO: 9479 - DNA, 23 bp, Homo sapiens
gtgggggtttagcaataggtagg

SEQ ID NO: 9480 - DNA, 23 bp, Homo sapiens
ccaggattattaactgagggagg

SEQ ID NO: 9481 - DNA, 23 bp, Homo sapiens
tgtatttgctgccaaatatgggg

SEQ ID NO: 9482 - DNA, 23 bp, Homo sapiens
tagtatcactgataacccatggg

SEQ ID NO: 9483 - DNA, 23 bp, Homo sapiens
aaataaaactcacggtgtggggg

SEQ ID NO: 9484 - DNA, 23 bp, Homo sapiens
tctcattctcaaaacactcgagg

SEQ ID NO: 9485 - DNA, 23 bp, Homo sapiens
aaaacctatgagtaacctcatgg

SEQ ID NO: 9486 - DNA, 23 bp, Homo sapiens
gacctacctccaaggtagggagg

SEQ ID NO: 9487 - DNA, 23 bp, Homo sapiens
aagttcctgtgagctgtggaggg

SEQ ID NO: 9488 - DNA, 23 bp, Homo sapiens
agaatcacgtaaattatcgtggg

SEQ ID NO: 9489 - DNA, 23 bp, Homo sapiens
actgaactataacatactccagg

SEQ ID NO: 9490 - DNA, 23 bp, Homo sapiens
agaaatcttggctagcctcaggg

SEQ ID NO: 9491 - DNA, 23 bp, Homo sapiens
tggcttaataataaaacaggagg

SEQ ID NO: 9492 - DNA, 23 bp, Homo sapiens
tgtaaccctccacagctcacagg

SEQ ID NO: 9493 - DNA, 23 bp, Homo sapiens
ctgacttaatctgtaaacaaagg

SEQ ID NO: 9494 - DNA, 23 bp, Homo sapiens
tccctcagttaataatcctgggg

SEQ ID NO: 9495 - DNA, 23 bp, Homo sapiens
ttaaactcatagtatcagaccgg

SEQ ID NO: 9496 - DNA, 23 bp, Homo sapiens
gtaactacacataatataggtgg

SEQ ID NO: 9497 - DNA, 23 bp, Homo sapiens
cccccaggattattaactgaggg

SEQ ID NO: 9498 - DNA, 23 bp, Homo sapiens
aaagatcacagaataagcctggg

SEQ ID NO: 9499 - DNA, 23 bp, Homo sapiens
agagaatgtgtacaaggcaaagg

SEQ ID NO: 9500 - DNA, 23 bp, Homo sapiens
tgaaagctagaaagtacatacgg

SEQ ID NO: 9501 - DNA, 23 bp, Homo sapiens
gcaagcaggacacaatcccatgg

SEQ ID NO: 9502 - DNA, 23 bp, Homo sapiens
gggagtaatgttcagtacccagg

SEQ ID NO: 9503 - DNA, 23 bp, Homo sapiens
gtagacctacctccaaggtaggg

SEQ ID NO: 9504 - DNA, 23 bp, Homo sapiens
ttcactgcctgagtcagcaaagg

SEQ ID NO: 9505 - DNA, 23 bp, Homo sapiens
gaattccgtcaggaattaagggg

SEQ ID NO: 9506 - DNA, 23 bp, Homo sapiens
atagtatcactgataacccatgg

SEQ ID NO: 9507 - DNA, 23 bp, Homo sapiens
tgaactgcagaatgctctagtgg

SEQ ID NO: 9508 - DNA, 23 bp, Homo sapiens
atttggaaacatgtcagaagagg

SEQ ID NO: 9509 - DNA, 23 bp, Homo sapiens
ctaagtagcccattttggcatgg

SEQ ID NO: 9510 - DNA, 23 bp, Homo sapiens
tttttgtaattctttttggtagg

SEQ ID NO: 9511 - DNA, 23 bp, Homo sapiens
tttgtttacagattaagtcaggg

SEQ ID NO: 9512 - DNA, 23 bp, Homo sapiens
ataatcacagcatttcagaatgg

SEQ ID NO: 9513 - DNA, 23 bp, Homo sapiens
gttttaacaggttttaaaagcgg

SEQ ID NO: 9514 - DNA, 23 bp, Homo sapiens
tcatttctagtaaaagaggccgg

SEQ ID NO: 9515 - DNA, 23 bp, Homo sapiens
agatattctcaaatggctgtggg

SEQ ID NO: 9516 - DNA, 23 bp, Homo sapiens
acatatcaataattaaccatagg

SEQ ID NO: 9517 - DNA, 23 bp, Homo sapiens
tgtcatgacaatttgctctgtgg

SEQ ID NO: 9518 - DNA, 23 bp, Homo sapiens
tctgagtaagtaagtcaaagagg

SEQ ID NO: 9519 - DNA, 23 bp, Homo sapiens
gctgcttagaactttatgaaagg

SEQ ID NO: 9520 - DNA, 23 bp, Homo sapiens
cccagttccagaactcccccagg

SEQ ID NO: 9521 - DNA, 23 bp, Homo sapiens
tggtacgtatttaaaatgagtgg

SEQ ID NO: 9522 - DNA, 23 bp, Homo sapiens
ttagattgtccttttcaggaagg

SEQ ID NO: 9523 - DNA, 23 bp, Homo sapiens
aagtgggaaaaaactataggtgg

SEQ ID NO: 9524 - DNA, 23 bp, Homo sapiens
aattatttgagggccatcccagg

SEQ ID NO: 9525 - DNA, 23 bp, Homo sapiens
gatttccccttaattcctgacgg

SEQ ID NO: 9526 - DNA, 23 bp, Homo sapiens
tgtatccttacaaaaggcccagg

SEQ ID NO: 9527 - DNA, 23 bp, Homo sapiens
tgtcctgcttgccattgaggtgg

SEQ ID NO: 9528 - DNA, 23 bp, Homo sapiens
tgagaaaatgagaatggctaagg

SEQ ID NO: 9529 - DNA, 23 bp, Homo sapiens
agtaaaagaactaagtcgctggg

SEQ ID NO: 9530 - DNA, 23 bp, Homo sapiens
atcaccagttgtactttgggagg

SEQ ID NO: 9531 - DNA, 23 bp, Homo sapiens
taagggctacagaagtacttagg

SEQ ID NO: 9532 - DNA, 23 bp, Homo sapiens
gtacagtcaataaatcagactgg

SEQ ID NO: 9533 - DNA, 23 bp, Homo sapiens
aggacagctctggggaagcaggg

SEQ ID NO: 9534 - DNA, 23 bp, Homo sapiens
tcaaatggctgtgggatcaaagg

SEQ ID NO: 9535 - DNA, 23 bp, Homo sapiens
ccaaatatggggttgttaagtgg

SEQ ID NO: 9536 - DNA, 23 bp, Homo sapiens
attcctttcaaatcaaccaaagg

SEQ ID NO: 9537 - DNA, 23 bp, Homo sapiens
ctacctttacctcaactcctggg

SEQ ID NO: 9538 - DNA, 23 bp, Homo sapiens
atgagtatcaaaaatgatgatgg

SEQ ID NO: 9539 - DNA, 23 bp, Homo sapiens
agttgcagttattttttccaagg

SEQ ID NO: 9540 - DNA, 23 bp, Homo sapiens
tggtgtatggaatgcaacccagg

SEQ ID NO: 9541 - DNA, 23 bp, Homo sapiens
aagatattctcaaatggctgtgg

SEQ ID NO: 9542 - DNA, 23 bp, Homo sapiens
atccccacctcccacctcaatgg

SEQ ID NO: 9543 - DNA, 23 bp, Homo sapiens
tatggctctcagcttgggacagg

SEQ ID NO: 9544 - DNA, 23 bp, Homo sapiens
ttgcattagtactagaacaaagg

SEQ ID NO: 9545 - DNA, 23 bp, Homo sapiens
gttttcgtttgaattccgtcagg

SEQ ID NO: 9546 - DNA, 23 bp, Homo sapiens
gccatatgtgtaaggctgaatgg

SEQ ID NO: 9547 - DNA, 23 bp, Homo sapiens
atttctgctgtggggactgttgg

SEQ ID NO: 9548 - DNA, 23 bp, Homo sapiens
actcatatctaaaatttactagg

SEQ ID NO: 9549 - DNA, 23 bp, Homo sapiens
caaattctagaccagctgtcagg

SEQ ID NO: 9550 - DNA, 23 bp, Homo sapiens
ctacttttctgaattaaagtggg

SEQ ID NO: 9551 - DNA, 23 bp, Homo sapiens
agttttggcctgcagctgatggg

SEQ ID NO: 9552 - DNA, 23 bp, Homo sapiens
gtaaaggtagcaagtcaaacagg

SEQ ID NO: 9553 - DNA, 23 bp, Homo sapiens
tgaattttctagagctctatggg

SEQ ID NO: 9554 - DNA, 23 bp, Homo sapiens
tcaacctcccaaagtacaactgg

SEQ ID NO: 9555 - DNA, 23 bp, Homo sapiens
tcaaaagttcagaaaaatagagg

SEQ ID NO: 9556 - DNA, 23 bp, Homo sapiens
atagtgataatatacagtactgg

SEQ ID NO: 9557 - DNA, 23 bp, Homo sapiens
ccaaggaatcaactgatatgagg

SEQ ID NO: 9558 - DNA, 23 bp, Homo sapiens
taccttcctccctaccttggagg

SEQ ID NO: 9559 - DNA, 23 bp, Homo sapiens
ttcctttcaaatcaaccaaaggg

SEQ ID NO: 9560 - DNA, 23 bp, Homo sapiens
gtaaaagacaaactaattgaagg

SEQ ID NO: 9561 - DNA, 23 bp, Homo sapiens
tgtctgaattaattatttgaggg

SEQ ID NO: 9562 - DNA, 23 bp, Homo sapiens
ggtaccatgaggttactcatagg

SEQ ID NO: 9563 - DNA, 23 bp, Homo sapiens
ttaaattaaaagaccaatgaggg

SEQ ID NO: 9564 - DNA, 23 bp, Homo sapiens
atgatggcagattagttgtttgg

SEQ ID NO: 9565 - DNA, 23 bp, Homo sapiens
aagccacatgaagaaacatttgg

SEQ ID NO: 9566 - DNA, 23 bp, Homo sapiens
attcttttgcaaactctcaatgg

SEQ ID NO: 9567 - DNA, 23 bp, Homo sapiens
gtttccacagttttaacattcgg

SEQ ID NO: 9568 - DNA, 23 bp, Homo sapiens
cctagacatgtagtgaaaactgg

SEQ ID NO: 9569 - DNA, 23 bp, Homo sapiens
ccataaatgctaaccctcattgg

SEQ ID NO: 9570 - DNA, 23 bp, Homo sapiens
tccacagctcacaggaactttgg

SEQ ID NO: 9571 - DNA, 23 bp, Homo sapiens
ggagggttacaaactccctttgg

SEQ ID NO: 9572 - DNA, 23 bp, Homo sapiens
ttacacatgtaaagttcattagg

SEQ ID NO: 9573 - DNA, 23 bp, Homo sapiens
ctaagaacaactttcttgattgg

SEQ ID NO: 9574 - DNA, 23 bp, Homo sapiens
acttagttcttttacttaatggg

SEQ ID NO: 9575 - DNA, 23 bp, Homo sapiens
gctttgtttccccttaaaaatgg

SEQ ID NO: 9576 - DNA, 23 bp, Homo sapiens
tggatgctacaaaaattttatgg

SEQ ID NO: 9577 - DNA, 23 bp, Homo sapiens
accagatgttaattgattaatgg

SEQ ID NO: 9578 - DNA, 23 bp, Homo sapiens
gagatttctttggcaataaatgg

SEQ ID NO: 9579 - DNA, 23 bp, Homo sapiens
agacaggagagggactacgaagg

SEQ ID NO: 9580 - DNA, 23 bp, Homo sapiens
gtagacctctttgtacaaggggg

SEQ ID NO: 9581 - DNA, 23 bp, Homo sapiens
ataatgattaccatcccaagagg

SEQ ID NO: 9582 - DNA, 23 bp, Homo sapiens
aatacctggacacaagctgaggg

SEQ ID NO: 9583 - DNA, 23 bp, Homo sapiens
ataagttttaatgggcatggagg

SEQ ID NO: 9584 - DNA, 23 bp, Homo sapiens
tagacaagaaagcatttgagggg

SEQ ID NO: 9585 - DNA, 23 bp, Homo sapiens
gtttccaaggaagtcacaagagg

SEQ ID NO: 9586 - DNA, 23 bp, Homo sapiens
ttaggaaatatagacaggagagg

SEQ ID NO: 9587 - DNA, 23 bp, Homo sapiens
cttccagcccaatagtaacgggg

SEQ ID NO: 9588 - DNA, 23 bp, Homo sapiens
aaaccatcatctatgacatgagg

SEQ ID NO: 9589 - DNA, 23 bp, Homo sapiens
aggccatcacctcaatacatggg

SEQ ID NO: 9590 - DNA, 23 bp, Homo sapiens
aaattatgagaccaccacctagg

SEQ ID NO: 9591 - DNA, 23 bp, Homo sapiens
ggaaaagagaaattaaaaggagg

SEQ ID NO: 9592 - DNA, 23 bp, Homo sapiens
atctccctgcctcatacacgagg

SEQ ID NO: 9593 - DNA, 23 bp, Homo sapiens
gctgaaataagaagatcctgagg

SEQ ID NO: 9594 - DNA, 23 bp, Homo sapiens
gtcaaactgtaggaaataagggg

SEQ ID NO: 9595 - DNA, 23 bp, Homo sapiens
aagctgagttactaatcacaagg

SEQ ID NO: 9596 - DNA, 23 bp, Homo sapiens
ggcagatcacataaaacaggagg

SEQ ID NO: 9597 - DNA, 23 bp, Homo sapiens
aaaagatcagatggtcacaaagg

SEQ ID NO: 9598 - DNA, 23 bp, Homo sapiens
tttgtgagccaagacatgagagg

SEQ ID NO: 9599 - DNA, 23 bp, Homo sapiens
tcacatttcagggagcattgtgg

SEQ ID NO: 9600 - DNA, 23 bp, Homo sapiens
atacaatgaagataaaatggagg

SEQ ID NO: 9601 - DNA, 23 bp, Homo sapiens
tattcagcagctgaaccacaagg

SEQ ID NO: 9602 - DNA, 23 bp, Homo sapiens
ttctttatatgagtacaactggg

SEQ ID NO: 9603 - DNA, 23 bp, Homo sapiens
ctgccaaaagtatgaacaggagg

SEQ ID NO: 9604 - DNA, 23 bp, Homo sapiens
tcagtaaagactgcttggagtgg

SEQ ID NO: 9605 - DNA, 23 bp, Homo sapiens
ctgtttttgagctcacaggaagg

SEQ ID NO: 9606 - DNA, 23 bp, Homo sapiens
taatacctggacacaagctgagg

SEQ ID NO: 9607 - DNA, 23 bp, Homo sapiens
gtttgaccaatatattgaagggg

SEQ ID NO: 9608 - DNA, 23 bp, Homo sapiens
agttctaccctatatttacaggg

SEQ ID NO: 9609 - DNA, 23 bp, Homo sapiens
ggactgattcctttcatgtgagg

SEQ ID NO: 9610 - DNA, 23 bp, Homo sapiens
tgtgagaagtattgaaacagagg

SEQ ID NO: 9611 - DNA, 23 bp, Homo sapiens
atgtattgcaaagaagccatggg

SEQ ID NO: 9612 - DNA, 23 bp, Homo sapiens
cagtcctcgtgtatgaggcaggg

SEQ ID NO: 9613 - DNA, 23 bp, Homo sapiens
tttgccaagaggtaagggaaggg

SEQ ID NO: 9614 - DNA, 23 bp, Homo sapiens
taataactcttgctatctggagg

SEQ ID NO: 9615 - DNA, 23 bp, Homo sapiens
acatatctttacctatgtgaggg

SEQ ID NO: 9616 - DNA, 23 bp, Homo sapiens
aacgttacaatcgtcatgagagg

SEQ ID NO: 9617 - DNA, 23 bp, Homo sapiens
tgaaaaaataatcagctaggagg

SEQ ID NO: 9618 - DNA, 23 bp, Homo sapiens
aatactgaaattgtaaacaatgg

SEQ ID NO: 9619 - DNA, 23 bp, Homo sapiens
acaatgctagacataaacattgg

SEQ ID NO: 9620 - DNA, 23 bp, Homo sapiens
cagtgttagatggtatgtagagg

SEQ ID NO: 9621 - DNA, 23 bp, Homo sapiens
tttttatttaactaaacacaggg

SEQ ID NO: 9622 - DNA, 23 bp, Homo sapiens
caacatgatatactgtgaagcgg

SEQ ID NO: 9623 - DNA, 23 bp, Homo sapiens
agcatcctgatattattccaggg

SEQ ID NO: 9624 - DNA, 23 bp, Homo sapiens
aaaaagtagtcccattccaaggg

SEQ ID NO: 9625 - DNA, 23 bp, Homo sapiens
tttatggcagcaataatctgtgg

SEQ ID NO: 9626 - DNA, 23 bp, Homo sapiens
atacatgctgtaatgcatgttgg

SEQ ID NO: 9627 - DNA, 23 bp, Homo sapiens
gtcttgttgttggagaatggtgg

SEQ ID NO: 9628 - DNA, 23 bp, Homo sapiens
tatgtttataaaaaattacaggg

SEQ ID NO: 9629 - DNA, 23 bp, Homo sapiens
tctatattgagacaagtacatgg

SEQ ID NO: 9630 - DNA, 23 bp, Homo sapiens
aatggcaatctttcttaacacgg

SEQ ID NO: 9631 - DNA, 23 bp, Homo sapiens
aaaaaccaactccacaggcatgg

SEQ ID NO: 9632 - DNA, 23 bp, Homo sapiens
gttgttggagaatggtggtgagg

SEQ ID NO: 9633 - DNA, 23 bp, Homo sapiens
ggaactgagtgacttagagcagg

SEQ ID NO: 9634 - DNA, 23 bp, Homo sapiens
catcacgtcaattgcctaggtgg

SEQ ID NO: 9635 - DNA, 23 bp, Homo sapiens
atataagttggattgccagaagg

SEQ ID NO: 9636 - DNA, 23 bp, Homo sapiens
gagctgtaacagttaactgtagg

SEQ ID NO: 9637 - DNA, 23 bp, Homo sapiens
tatatcccccttgtacaaagagg

SEQ ID NO: 9638 - DNA, 23 bp, Homo sapiens
aatggttaaaacctattgtgagg

SEQ ID NO: 9639 - DNA, 23 bp, Homo sapiens
ttagttatactaacacatacggg

SEQ ID NO: 9640 - DNA, 23 bp, Homo sapiens
agaattttatagaaaccttgtgg

SEQ ID NO: 9641 - DNA, 23 bp, Homo sapiens
gcatactggtatttttcacgtgg

SEQ ID NO: 9642 - DNA, 23 bp, Homo sapiens
ttttttagctgcctttccagtgg

SEQ ID NO: 9643 - DNA, 23 bp, Homo sapiens
gagcaggcgaacaaaatgctggg

SEQ ID NO: 9644 - DNA, 23 bp, Homo sapiens
tttttaaagaagtcaatccaggg

SEQ ID NO: 9645 - DNA, 23 bp, Homo sapiens
aggcttacaatgagaaaagaggg

SEQ ID NO: 9646 - DNA, 23 bp, Homo sapiens
gccttgtgctaccatgcctgtgg

SEQ ID NO: 9647 - DNA, 23 bp, Homo sapiens
actttctttgcatacagtggagg

SEQ ID NO: 9648 - DNA, 23 bp, Homo sapiens
acatctgataagtagcacttagg

SEQ ID NO: 9649 - DNA, 23 bp, Homo sapiens
ttggttcactgaaatagcaaggg

SEQ ID NO: 9650 - DNA, 23 bp, Homo sapiens
gcctttccagtggcaaaagtagg

SEQ ID NO: 9651 - DNA, 23 bp, Homo sapiens
taggaaatatagacaggagaggg

SEQ ID NO: 9652 - DNA, 23 bp, Homo sapiens
agacatcacgtcaattgcctagg

SEQ ID NO: 9653 - DNA, 23 bp, Homo sapiens
aaattcatagctcaatgcacagg

SEQ ID NO: 9654 - DNA, 23 bp, Homo sapiens
ttatggtatatgaatgtggatgg

SEQ ID NO: 9655 - DNA, 23 bp, Homo sapiens
aacatcctatccctattcaaagg

SEQ ID NO: 9656 - DNA, 23 bp, Homo sapiens
actgtgattgaaaatcatatagg

SEQ ID NO: 9657 - DNA, 23 bp, Homo sapiens
gctggaagaaattcactctaggg

SEQ ID NO: 9658 - DNA, 23 bp, Homo sapiens
ttgtagacctctttgtacaaggg

SEQ ID NO: 9659 - DNA, 23 bp, Homo sapiens
gtatgtagaggaaggccagatgg

SEQ ID NO: 9660 - DNA, 23 bp, Homo sapiens
gatggatgaactgttgcccccgg

SEQ ID NO: 9661 - DNA, 23 bp, Homo sapiens
tccttgggcaaaagatcagatgg

SEQ ID NO: 9662 - DNA, 23 bp, Homo sapiens
gctcctttgcttgtaaccagagg

SEQ ID NO: 9663 - DNA, 23 bp, Homo sapiens
acacattctataattagggatgg

SEQ ID NO: 9664 - DNA, 23 bp, Homo sapiens
aatcacatgtgctgttgaaaggg

SEQ ID NO: 9665 - DNA, 23 bp, Homo sapiens
gaactgccatgtacaagaagagg

SEQ ID NO: 9666 - DNA, 23 bp, Homo sapiens
aagtttgtagtattgcctccagg

SEQ ID NO: 9667 - DNA, 23 bp, Homo sapiens
ccattctccaacaacaagacagg

SEQ ID NO: 9668 - DNA, 23 bp, Homo sapiens
tgtccaaagccaagaaacattgg

SEQ ID NO: 9669 - DNA, 23 bp, Homo sapiens
cctgttcatacttttggcagcgg

SEQ ID NO: 9670 - DNA, 23 bp, Homo sapiens
ttattatgtaatgattgtgtggg

SEQ ID NO: 9671 - DNA, 23 bp, Homo sapiens
ttacagacaatgcatttacaagg

SEQ ID NO: 9672 - DNA, 23 bp, Homo sapiens
agtttgaccaatatattgaaggg

SEQ ID NO: 9673 - DNA, 23 bp, Homo sapiens
atgtaatcttatgagtaagaagg

SEQ ID NO: 9674 - DNA, 23 bp, Homo sapiens
gatttgacttgaataatacctgg

SEQ ID NO: 9675 - DNA, 23 bp, Homo sapiens
ctgcaagaagaggcacaccctgg

SEQ ID NO: 9676 - DNA, 23 bp, Homo sapiens
tggaagcaatgggtacatatggg

SEQ ID NO: 9677 - DNA, 23 bp, Homo sapiens
tggatacatgtgcccatggaggg

SEQ ID NO: 9678 - DNA, 23 bp, Homo sapiens
tcactcaatgcattagaatgagg

SEQ ID NO: 9679 - DNA, 23 bp, Homo sapiens
tgtatgctacattcagctatggg

SEQ ID NO: 9680 - DNA, 23 bp, Homo sapiens
ggcaatccaacttatatgcaagg

SEQ ID NO: 9681 - DNA, 23 bp, Homo sapiens
ttcttatttctccatcccgaagg

SEQ ID NO: 9682 - DNA, 23 bp, Homo sapiens
tgccgaagcaagcacctgatggg

SEQ ID NO: 9683 - DNA, 23 bp, Homo sapiens
atatatatcgatcagggccaagg

SEQ ID NO: 9684 - DNA, 23 bp, Homo sapiens
tgtagttcagtgtgtctggaggg

SEQ ID NO: 9685 - DNA, 23 bp, Homo sapiens
tttggttcactgaaatagcaagg

SEQ ID NO: 9686 - DNA, 23 bp, Homo sapiens
aataccctcagcttgtgtccagg

SEQ ID NO: 9687 - DNA, 23 bp, Homo sapiens
ctatcttttctaaacgctcaggg

SEQ ID NO: 9688 - DNA, 23 bp, Homo sapiens
ctgcctctggttacaagcaaagg

SEQ ID NO: 9689 - DNA, 23 bp, Homo sapiens
gagaagataaaacctgtgcttgg

SEQ ID NO: 9690 - DNA, 23 bp, Homo sapiens
gaccttttgaagcagttgcatgg

SEQ ID NO: 9691 - DNA, 23 bp, Homo sapiens
ttacctatgtgagggactgaagg

SEQ ID NO: 9692 - DNA, 23 bp, Homo sapiens
tgagcgtttagaaaagatagtgg

SEQ ID NO: 9693 - DNA, 23 bp, Homo sapiens
atagacaagaaagcatttgaggg

SEQ ID NO: 9694 - DNA, 23 bp, Homo sapiens
ttttgtcttatgtagttggatgg

SEQ ID NO: 9695 - DNA, 23 bp, Homo sapiens
atggcttctttgcaatacattgg

SEQ ID NO: 9696 - DNA, 23 bp, Homo sapiens
agtctcctttgaatagggatagg

SEQ ID NO: 9697 - DNA, 23 bp, Homo sapiens
tgagcatagctgataagagttgg

SEQ ID NO: 9698 - DNA, 23 bp, Homo sapiens
ggatggatattatcaagtatagg

SEQ ID NO: 9699 - DNA, 23 bp, Homo sapiens
tataactgcatgaattagcttgg

SEQ ID NO: 9700 - DNA, 23 bp, Homo sapiens
atattatcaagtataggcttagg

SEQ ID NO: 9701 - DNA, 23 bp, Homo sapiens
tggtggtctcataatttctaggg

SEQ ID NO: 9702 - DNA, 23 bp, Homo sapiens
tttctacatttgccaagcacagg

SEQ ID NO: 9703 - DNA, 23 bp, Homo sapiens
tgattgaaaatcatataggctgg

SEQ ID NO: 9704 - DNA, 23 bp, Homo sapiens
ttcttccagcccaatagtaacgg

SEQ ID NO: 9705 - DNA, 23 bp, Homo sapiens
tgagttcccatattcatcactgg

SEQ ID NO: 9706 - DNA, 23 bp, Homo sapiens
atgtacttgtctcaatatagagg

SEQ ID NO: 9707 - DNA, 23 bp, Homo sapiens
aatttgcctcttcttgtacatgg

SEQ ID NO: 9708 - DNA, 23 bp, Homo sapiens
ggaatcagtcctcgtgtatgagg

SEQ ID NO: 9709 - DNA, 23 bp, Homo sapiens
ttgggtataataaaaagcactgg

SEQ ID NO: 9710 - DNA, 23 bp, Homo sapiens
tgtgttattttgataggcctggg

SEQ ID NO: 9711 - DNA, 23 bp, Homo sapiens
ctacttcatttccttcgggatgg

SEQ ID NO: 9712 - DNA, 23 bp, Homo sapiens
agagcaggcgaacaaaatgctgg

SEQ ID NO: 9713 - DNA, 23 bp, Homo sapiens
tctatgtatatgtaaccctttgg

SEQ ID NO: 9714 - DNA, 23 bp, Homo sapiens
tgttttatgtgatctgcccatgg

SEQ ID NO: 9715 - DNA, 23 bp, Homo sapiens
gaggccatcacctcaatacatgg

SEQ ID NO: 9716 - DNA, 23 bp, Homo sapiens
gcaataatctgtggaagcaatgg

SEQ ID NO: 9717 - DNA, 23 bp, Homo sapiens
atgtgcattttttaaacaagtgg

SEQ ID NO: 9718 - DNA, 23 bp, Homo sapiens
ttattctgattgtatgaagtagg

SEQ ID NO: 9719 - DNA, 23 bp, Homo sapiens
ctgaatttgccaagaggtaaggg

SEQ ID NO: 9720 - DNA, 23 bp, Homo sapiens
aacttattgatcactccaaaggg

SEQ ID NO: 9721 - DNA, 23 bp, Homo sapiens
atgctccctgaaatgtgaaaagg

SEQ ID NO: 9722 - DNA, 23 bp, Homo sapiens
ggagttttaaatctcccatcagg

SEQ ID NO: 9723 - DNA, 23 bp, Homo sapiens
gttccccgttactattgggctgg

SEQ ID NO: 9724 - DNA, 23 bp, Homo sapiens
atcgtccctattttgccgtaagg

SEQ ID NO: 9725 - DNA, 23 bp, Homo sapiens
cctaaacatgtcccttaaaaggg

SEQ ID NO: 9726 - DNA, 23 bp, Homo sapiens
atatgtattttatcttaaagagg

SEQ ID NO: 9727 - DNA, 23 bp, Homo sapiens
caactacataagacaaaaagagg

SEQ ID NO: 9728 - DNA, 23 bp, Homo sapiens
tgaactttgggagaatccttggg

SEQ ID NO: 9729 - DNA, 23 bp, Homo sapiens
catttccctttaccctccatggg

SEQ ID NO: 9730 - DNA, 23 bp, Homo sapiens
tgccatgcaactgcttcaaaagg

SEQ ID NO: 9731 - DNA, 23 bp, Homo sapiens
ctgttcatacttttggcagcggg

SEQ ID NO: 9732 - DNA, 23 bp, Homo sapiens
acattttctataatgattgtggg

SEQ ID NO: 9733 - DNA, 23 bp, Homo sapiens
atattatatgataattaagaagg

SEQ ID NO: 9734 - DNA, 23 bp, Homo sapiens
gtggagttggtttttaagcatgg

SEQ ID NO: 9735 - DNA, 23 bp, Homo sapiens
tcagtcctcgtgtatgaggcagg

SEQ ID NO: 9736 - DNA, 23 bp, Homo sapiens
caggatatagatgatatagaagg

SEQ ID NO: 9737 - DNA, 23 bp, Homo sapiens
gcacaccctggaataatatcagg

SEQ ID NO: 9738 - DNA, 23 bp, Homo sapiens
actgatttgattattccaattgg

SEQ ID NO: 9739 - DNA, 23 bp, Homo sapiens
aacagaccttgcatataagttgg

SEQ ID NO: 9740 - DNA, 23 bp, Homo sapiens
gagcatagtttgtttttcccagg

SEQ ID NO: 9741 - DNA, 23 bp, Homo sapiens
tctagttcatttgcattgcatgg

SEQ ID NO: 9742 - DNA, 23 bp, Homo sapiens
ttttgggcatccttgaatgtagg

SEQ ID NO: 9743 - DNA, 23 bp, Homo sapiens
atgtgcccatggagggtaaaggg

SEQ ID NO: 9744 - DNA, 23 bp, Homo sapiens
acatattctgccacatagcctgg

SEQ ID NO: 9745 - DNA, 23 bp, Homo sapiens
ctttatcttatgaagtatagagg

SEQ ID NO: 9746 - DNA, 23 bp, Homo sapiens
gagaaactgttcttgcttgttgg

SEQ ID NO: 9747 - DNA, 23 bp, Homo sapiens
acacagggcaaaaactaatctgg

SEQ ID NO: 9748 - DNA, 23 bp, Homo sapiens
gcattcaccctgtaaatataggg

SEQ ID NO: 9749 - DNA, 23 bp, Homo sapiens
tctcaaatacctattatagttgg

SEQ ID NO: 9750 - DNA, 23 bp, Homo sapiens
aatatcttatagaagaactttgg

SEQ ID NO: 9751 - DNA, 23 bp, Homo sapiens
atagtactaaaactactattagg

SEQ ID NO: 9752 - DNA, 23 bp, Homo sapiens
tcttccagcccaatagtaacggg

SEQ ID NO: 9753 - DNA, 23 bp, Homo sapiens
agttacatctcaaataactttgg

SEQ ID NO: 9754 - DNA, 23 bp, Homo sapiens
aggaaccttacggcaaaataggg

SEQ ID NO: 9755 - DNA, 23 bp, Homo sapiens
aatgttctaggcaatggaattgg

SEQ ID NO: 9756 - DNA, 23 bp, Homo sapiens
gcacaaatgttctatgagattgg

SEQ ID NO: 9757 - DNA, 23 bp, Homo sapiens
gcagttttttctaattgccttgg

SEQ ID NO: 9758 - DNA, 23 bp, Homo sapiens
atctggttgcttcttttgtaggg

SEQ ID NO: 9759 - DNA, 23 bp, Homo sapiens
ttgacgtgcatcccttttaaggg

SEQ ID NO: 9760 - DNA, 23 bp, Homo sapiens
ttcattacttcagtgttagatgg

SEQ ID NO: 9761 - DNA, 23 bp, Homo sapiens
aattaagtctcctttgaataggg

SEQ ID NO: 9762 - DNA, 23 bp, Homo sapiens
agtgatcaataagttttaatggg

SEQ ID NO: 9763 - DNA, 23 bp, Homo sapiens
ggattgatccaaatctttgctgg

SEQ ID NO: 9764 - DNA, 23 bp, Homo sapiens
atttatttctagcccacaatagg

SEQ ID NO: 9765 - DNA, 23 bp, Homo sapiens
gggtatttaagttgattagaagg

SEQ ID NO: 9766 - DNA, 23 bp, Homo sapiens
atagtctgtagcatgataattgg

SEQ ID NO: 9767 - DNA, 23 bp, Homo sapiens
gtttaattaaaaatactctaagg

SEQ ID NO: 9768 - DNA, 23 bp, Homo sapiens
tgaaacacattctataattaggg

SEQ ID NO: 9769 - DNA, 23 bp, Homo sapiens
aatactacttcatttccttcggg

SEQ ID NO: 9770 - DNA, 23 bp, Homo sapiens
atacttttggcagcgggccgggg

SEQ ID NO: 9771 - DNA, 23 bp, Homo sapiens
ggtcaaactgtaggaaataaggg

SEQ ID NO: 9772 - DNA, 23 bp, Homo sapiens
attattgtcaaatacttagaagg

SEQ ID NO: 9773 - DNA, 23 bp, Homo sapiens
agattattgctgccataaaatgg

SEQ ID NO: 9774 - DNA, 23 bp, Homo sapiens
tgttttatctgacttaagtttgg

SEQ ID NO: 9775 - DNA, 23 bp, Homo sapiens
tcatgtactaaatttccttatgg

SEQ ID NO: 9776 - DNA, 23 bp, Homo sapiens
gtatctcttcacttgctcatagg

SEQ ID NO: 9777 - DNA, 23 bp, Homo sapiens
gtgggctagaaataaataaaagg

SEQ ID NO: 9778 - DNA, 23 bp, Homo sapiens
ttagcgccccttcaatatattgg

SEQ ID NO: 9779 - DNA, 23 bp, Homo sapiens
gtatgtttataaaaaattacagg

SEQ ID NO: 9780 - DNA, 23 bp, Homo sapiens
aagaaaatgcagtttttagtagg

SEQ ID NO: 9781 - DNA, 23 bp, Homo sapiens
tttttttgtcaggagataatagg

SEQ ID NO: 9782 - DNA, 23 bp, Homo sapiens
tagaattctttgattgactatgg

SEQ ID NO: 9783 - DNA, 23 bp, Homo sapiens
ctcagttccccgttactattggg

SEQ ID NO: 9784 - DNA, 23 bp, Homo sapiens
atccttttagcctaccaaaatgg

SEQ ID NO: 9785 - DNA, 23 bp, Homo sapiens
gtatttttaattaaacttactgg

SEQ ID NO: 9786 - DNA, 23 bp, Homo sapiens
ttacctcctgttcatacttttgg

SEQ ID NO: 9787 - DNA, 23 bp, Homo sapiens
tcttatttcagcttccaaattgg

SEQ ID NO: 9788 - DNA, 23 bp, Homo sapiens
ataatatgtaaataattaaatgg

SEQ ID NO: 9789 - DNA, 23 bp, Homo sapiens
actagtcgtggagagctttcagg

SEQ ID NO: 9790 - DNA, 23 bp, Homo sapiens
ttgctatctccaactataatagg

SEQ ID NO: 9791 - DNA, 23 bp, Homo sapiens
agtctcacaaaactgcagagcgg

SEQ ID NO: 9792 - DNA, 23 bp, Homo sapiens
gctttgtggagtcaacaccatgg

SEQ ID NO: 9793 - DNA, 23 bp, Homo sapiens
taacctattcataagcacagagg

SEQ ID NO: 9794 - DNA, 23 bp, Homo sapiens
atggtttagacacagaactgggg

SEQ ID NO: 9795 - DNA, 23 bp, Homo sapiens
cttcagatgatacaaaaacgggg

SEQ ID NO: 9796 - DNA, 23 bp, Homo sapiens
caaggagtgtgaaaacacgtggg

SEQ ID NO: 9797 - DNA, 23 bp, Homo sapiens
ctgagccatatacctcactgtgg

SEQ ID NO: 9798 - DNA, 23 bp, Homo sapiens
acagaactagagatgtcaggtgg

SEQ ID NO: 9799 - DNA, 23 bp, Homo sapiens
aacaatgtgacagatgacagagg

SEQ ID NO: 9800 - DNA, 23 bp, Homo sapiens
gtgaatttgaaagtgactggtgg

SEQ ID NO: 9801 - DNA, 23 bp, Homo sapiens
gcaaaaactgcatgacccagagg

SEQ ID NO: 9802 - DNA, 23 bp, Homo sapiens
gggcagttctctccacagtgagg

SEQ ID NO: 9803 - DNA, 23 bp, Homo sapiens
ctataggtgataaactactgtgg

SEQ ID NO: 9804 - DNA, 23 bp, Homo sapiens
actcagggagagtacatgggagg

SEQ ID NO: 9805 - DNA, 23 bp, Homo sapiens
ccatgtggaaacaagcagagagg

SEQ ID NO: 9806 - DNA, 23 bp, Homo sapiens
gatgacttggaccctgtgggagg

SEQ ID NO: 9807 - DNA, 23 bp, Homo sapiens
tccaagcactctactcacgatgg

SEQ ID NO: 9808 - DNA, 23 bp, Homo sapiens
aagatggaggaagattgtggtgg

SEQ ID NO: 9809 - DNA, 23 bp, Homo sapiens
tagccaagctgacacaaccaggg

SEQ ID NO: 9810 - DNA, 23 bp, Homo sapiens
ttcaaaatatcaaaagcctgggg

SEQ ID NO: 9811 - DNA, 23 bp, Homo sapiens
ggtctgagtaggatccgggaagg

SEQ ID NO: 9812 - DNA, 23 bp, Homo sapiens
aaaacagaccaggtgaactgagg

SEQ ID NO: 9813 - DNA, 23 bp, Homo sapiens
aagcatgactctccaaactgtgg

SEQ ID NO: 9814 - DNA, 23 bp, Homo sapiens
actgacattacaggtacccgagg

SEQ ID NO: 9815 - DNA, 23 bp, Homo sapiens
gtgtacctcaaaatggctgaagg

SEQ ID NO: 9816 - DNA, 23 bp, Homo sapiens
agatggaggaagattgtggtggg

SEQ ID NO: 9817 - DNA, 23 bp, Homo sapiens
catgccagcctagtaccttgagg

SEQ ID NO: 9818 - DNA, 23 bp, Homo sapiens
tattacaacatagcaaggcgagg

SEQ ID NO: 9819 - DNA, 23 bp, Homo sapiens
tatcttccccccttccacagagg

SEQ ID NO: 9820 - DNA, 23 bp, Homo sapiens
agaacacagtgcccatcaggagg

SEQ ID NO: 9821 - DNA, 23 bp, Homo sapiens
attttactagggcagtggtgagg

SEQ ID NO: 9822 - DNA, 23 bp, Homo sapiens
cttcccagtctatgaaaccaagg

SEQ ID NO: 9823 - DNA, 23 bp, Homo sapiens
ggcactcagggagagtacatggg

SEQ ID NO: 9824 - DNA, 23 bp, Homo sapiens
aaagtgacaattcattgcagggg

SEQ ID NO: 9825 - DNA, 23 bp, Homo sapiens
agtgatattattgtacacgtagg

SEQ ID NO: 9826 - DNA, 23 bp, Homo sapiens
gatgatgacttggaccctgtggg

SEQ ID NO: 9827 - DNA, 23 bp, Homo sapiens
gaaatacgttaaccattgcaggg

SEQ ID NO: 9828 - DNA, 23 bp, Homo sapiens
attgataattgtctacagggtgg

SEQ ID NO: 9829 - DNA, 23 bp, Homo sapiens
ctgaggtagctacaaaacctggg

SEQ ID NO: 9830 - DNA, 23 bp, Homo sapiens
tgtaagtgtgtctccctctgtgg

SEQ ID NO: 9831 - DNA, 23 bp, Homo sapiens
tttcaggaaagagtggctagtgg

SEQ ID NO: 9832 - DNA, 23 bp, Homo sapiens
tcataaggaaagagaatcagggg

SEQ ID NO: 9833 - DNA, 23 bp, Homo sapiens
gcaaggcgaggaatttccgaagg

SEQ ID NO: 9834 - DNA, 23 bp, Homo sapiens
agtcatcatccaatgcatggtgg

SEQ ID NO: 9835 - DNA, 23 bp, Homo sapiens
attgctggcataaagagatgagg

SEQ ID NO: 9836 - DNA, 23 bp, Homo sapiens
gaatgccataggaagcacttggg

SEQ ID NO: 9837 - DNA, 23 bp, Homo sapiens
gccaggctcgaatcaatgagagg

SEQ ID NO: 9838 - DNA, 23 bp, Homo sapiens
tcattgactctagtgtcccatgg

SEQ ID NO: 9839 - DNA, 23 bp, Homo sapiens
tgtcctcaaggataatgtagagg

SEQ ID NO: 9840 - DNA, 23 bp, Homo sapiens
agagatctttggagccaccaggg

SEQ ID NO: 9841 - DNA, 23 bp, Homo sapiens
catctcagcaaagatatctgagg

SEQ ID NO: 9842 - DNA, 23 bp, Homo sapiens
atctctttatgccagcaatgagg

SEQ ID NO: 9843 - DNA, 23 bp, Homo sapiens
tgacattttagaatttgtggggg

SEQ ID NO: 9844 - DNA, 23 bp, Homo sapiens
attagaatttgtgtataccaggg

SEQ ID NO: 9845 - DNA, 23 bp, Homo sapiens
atgcctctacattatccttgagg

SEQ ID NO: 9846 - DNA, 23 bp, Homo sapiens
agagacttagagcccaacttggg

SEQ ID NO: 9847 - DNA, 23 bp, Homo sapiens
aaagagatgaggctatccactgg

SEQ ID NO: 9848 - DNA, 23 bp, Homo sapiens
tctcatatttatgagtcagaggg

SEQ ID NO: 9849 - DNA, 23 bp, Homo sapiens
tttgcatttgatgaacattgagg

SEQ ID NO: 9850 - DNA, 23 bp, Homo sapiens
aaagaatcaggagtccgtaaggg

SEQ ID NO: 9851 - DNA, 23 bp, Homo sapiens
aagagacaggtttctgaccaggg

SEQ ID NO: 9852 - DNA, 23 bp, Homo sapiens
gttctcgtaaactaccaggatgg

SEQ ID NO: 9853 - DNA, 23 bp, Homo sapiens
agatagtctaaatcaaatgaggg

SEQ ID NO: 9854 - DNA, 23 bp, Homo sapiens
tgaaactcaaacgtgcctcaagg

SEQ ID NO: 9855 - DNA, 23 bp, Homo sapiens
tatgcgaacaaaacttacatggg

SEQ ID NO: 9856 - DNA, 23 bp, Homo sapiens
attctgtctgcttaccctggagg

SEQ ID NO: 9857 - DNA, 23 bp, Homo sapiens
ggatgatgacttggaccctgtgg

SEQ ID NO: 9858 - DNA, 23 bp, Homo sapiens
gatctgtgtgatactcccatagg

SEQ ID NO: 9859 - DNA, 23 bp, Homo sapiens
aactggggctcagctcacactgg

SEQ ID NO: 9860 - DNA, 23 bp, Homo sapiens
attattaaagatcatcaggatgg

SEQ ID NO: 9861 - DNA, 23 bp, Homo sapiens
aataaatgtgggtcactagaggg

SEQ ID NO: 9862 - DNA, 23 bp, Homo sapiens
cccagaactctaagagatggtgg

SEQ ID NO: 9863 - DNA, 23 bp, Homo sapiens
gtttaaataacttccaacccggg

SEQ ID NO: 9864 - DNA, 23 bp, Homo sapiens
ttgtaaagtcccatcatacaggg

SEQ ID NO: 9865 - DNA, 23 bp, Homo sapiens
ttactgacattcagtgacatggg

SEQ ID NO: 9866 - DNA, 23 bp, Homo sapiens
ggaaactcaactttctcctgggg

SEQ ID NO: 9867 - DNA, 23 bp, Homo sapiens
agtttaaattgcctcccacaggg

SEQ ID NO: 9868 - DNA, 23 bp, Homo sapiens
ctactgataaatttaaagagcgg

SEQ ID NO: 9869 - DNA, 23 bp, Homo sapiens
tagatagttaagaaactatgtgg

SEQ ID NO: 9870 - DNA, 23 bp, Homo sapiens
tcatgttctcgtaaactaccagg

SEQ ID NO: 9871 - DNA, 23 bp, Homo sapiens
actcccagaactctaagagatgg

SEQ ID NO: 9872 - DNA, 23 bp, Homo sapiens
ttgatttcatgggaaacaggtgg

SEQ ID NO: 9873 - DNA, 23 bp, Homo sapiens
tttatgaacgctttacttggggg

SEQ ID NO: 9874 - DNA, 23 bp, Homo sapiens
atgaagatggaggaagattgtgg

SEQ ID NO: 9875 - DNA, 23 bp, Homo sapiens
aaatgtgtaaactttgagagtgg

SEQ ID NO: 9876 - DNA, 23 bp, Homo sapiens
agataatcaagtgttgccatggg

SEQ ID NO: 9877 - DNA, 23 bp, Homo sapiens
actttgcactaagtgagcctggg

SEQ ID NO: 9878 - DNA, 23 bp, Homo sapiens
ttatgacagcccccataaagggg

SEQ ID NO: 9879 - DNA, 23 bp, Homo sapiens
tgtcagaagagcctcctgatggg

SEQ ID NO: 9880 - DNA, 23 bp, Homo sapiens
ttacttcatacttctgctggagg

SEQ ID NO: 9881 - DNA, 23 bp, Homo sapiens
ccaagtcatcatccaatgcatgg

SEQ ID NO: 9882 - DNA, 23 bp, Homo sapiens
aatgaataatttatccctggtgg

SEQ ID NO: 9883 - DNA, 23 bp, Homo sapiens
atataatgtggttaagaccatgg

SEQ ID NO: 9884 - DNA, 23 bp, Homo sapiens
ttaggtattatgtaaatcagtgg

SEQ ID NO: 9885 - DNA, 23 bp, Homo sapiens
gacattttactatacagcccagg

SEQ ID NO: 9886 - DNA, 23 bp, Homo sapiens
aagacttttggagctcaccatgg

SEQ ID NO: 9887 - DNA, 23 bp, Homo sapiens
actagatccttttggaacccggg

SEQ ID NO: 9888 - DNA, 23 bp, Homo sapiens
tttacaagttttaatttcagggg

SEQ ID NO: 9889 - DNA, 23 bp, Homo sapiens
agggaggcctggacaccagttgg

SEQ ID NO: 9890 - DNA, 23 bp, Homo sapiens
ctgcatcctaactacataggagg

SEQ ID NO: 9891 - DNA, 23 bp, Homo sapiens
gcagttgctggatgcacaagcgg

SEQ ID NO: 9892 - DNA, 23 bp, Homo sapiens
agaaagtgagaaatggcataggg

SEQ ID NO: 9893 - DNA, 23 bp, Homo sapiens
tgaattctagagaatgctatggg

SEQ ID NO: 9894 - DNA, 23 bp, Homo sapiens
tcgttcgtaattaaatacccagg

SEQ ID NO: 9895 - DNA, 23 bp, Homo sapiens
acatgaaatgacggaaatgatgg

SEQ ID NO: 9896 - DNA, 23 bp, Homo sapiens
ccaaggagtgtgaaaacacgtgg

SEQ ID NO: 9897 - DNA, 23 bp, Homo sapiens
ggacaaaaagagttttagcaagg

SEQ ID NO: 9898 - DNA, 23 bp, Homo sapiens
catgtggaaacaagcagagaggg

SEQ ID NO: 9899 - DNA, 23 bp, Homo sapiens
ttaattgataattgtctacaggg

SEQ ID NO: 9900 - DNA, 23 bp, Homo sapiens
agctacagtgtacctcagacagg

SEQ ID NO: 9901 - DNA, 23 bp, Homo sapiens
gagaaagtgagaaatggcatagg

SEQ ID NO: 9902 - DNA, 23 bp, Homo sapiens
gtggagataaccaatatacttgg

SEQ ID NO: 9903 - DNA, 23 bp, Homo sapiens
agacatttaatgcaaaactaggg

SEQ ID NO: 9904 - DNA, 23 bp, Homo sapiens
gcctaaatgagaagtcccattgg

SEQ ID NO: 9905 - DNA, 23 bp, Homo sapiens
tctctctcaaaaatatgcaatgg

SEQ ID NO: 9906 - DNA, 23 bp, Homo sapiens
actgcaatcaacgattctatggg

SEQ ID NO: 9907 - DNA, 23 bp, Homo sapiens
ataggctttttattataactggg

SEQ ID NO: 9908 - DNA, 23 bp, Homo sapiens
agagccctgggaccctgcaatgg

SEQ ID NO: 9909 - DNA, 23 bp, Homo sapiens
aatgccatctgcaaagcactggg

SEQ ID NO: 9910 - DNA, 23 bp, Homo sapiens
gctattacagataacatacaagg

SEQ ID NO: 9911 - DNA, 23 bp, Homo sapiens
acaagtcaggtaaagagtcgtgg

SEQ ID NO: 9912 - DNA, 23 bp, Homo sapiens
ggtttcatagactgggaaggggg

SEQ ID NO: 9913 - DNA, 23 bp, Homo sapiens
gtctgtgaagattttaagggagg

SEQ ID NO: 9914 - DNA, 23 bp, Homo sapiens
aatggtttagacacagaactggg

SEQ ID NO: 9915 - DNA, 23 bp, Homo sapiens
atatcaacacgaaagaagacagg

SEQ ID NO: 9916 - DNA, 23 bp, Homo sapiens
tataattcactggtttgggtagg

SEQ ID NO: 9917 - DNA, 23 bp, Homo sapiens
accgtcaagtttctgacccatgg

SEQ ID NO: 9918 - DNA, 23 bp, Homo sapiens
ctgaacctaaaactaagcgttgg

SEQ ID NO: 9919 - DNA, 23 bp, Homo sapiens
atttaataccaaattaaggtagg

SEQ ID NO: 9920 - DNA, 23 bp, Homo sapiens
gcttgcagatagagagacacagg

SEQ ID NO: 9921 - DNA, 23 bp, Homo sapiens
gtttggagaatggattgtgttgg

SEQ ID NO: 9922 - DNA, 23 bp, Homo sapiens
atatttggtatatatgccccagg

SEQ ID NO: 9923 - DNA, 23 bp, Homo sapiens
ccgttgaagtaattaagcatagg

SEQ ID NO: 9924 - DNA, 23 bp, Homo sapiens
tttttgttttcaggaaagagtgg

SEQ ID NO: 9925 - DNA, 23 bp, Homo sapiens
ttttaaacatttatatacacagg

SEQ ID NO: 9926 - DNA, 23 bp, Homo sapiens
atgtcagaagagcctcctgatgg

SEQ ID NO: 9927 - DNA, 23 bp, Homo sapiens
catgaagacatttaaatcagagg

SEQ ID NO: 9928 - DNA, 23 bp, Homo sapiens
atattcagtgaaatattagtggg

SEQ ID NO: 9929 - DNA, 23 bp, Homo sapiens
agagatataaaaatgatgccagg

SEQ ID NO: 9930 - DNA, 23 bp, Homo sapiens
agaataatactgaatgccatagg

SEQ ID NO: 9931 - DNA, 23 bp, Homo sapiens
aattgaagacaagctctgaaagg

SEQ ID NO: 9932 - DNA, 23 bp, Homo sapiens
ttatgtgagttgttaaagtgggg

SEQ ID NO: 9933 - DNA, 23 bp, Homo sapiens
tctctccaatattctgccagtgg

SEQ ID NO: 9934 - DNA, 23 bp, Homo sapiens
tcagtggtttacacagcacctgg

SEQ ID NO: 9935 - DNA, 23 bp, Homo sapiens
aaaatattttgacgtctggtagg

SEQ ID NO: 9936 - DNA, 23 bp, Homo sapiens
atatacttggcagagcctctagg

SEQ ID NO: 9937 - DNA, 23 bp, Homo sapiens
ctttatgccagcaatgaggatgg

SEQ ID NO: 9938 - DNA, 23 bp, Homo sapiens
tttctgcagtgaattggaggtgg

SEQ ID NO: 9939 - DNA, 23 bp, Homo sapiens
aacttgaaattaagagactaggg

SEQ ID NO: 9940 - DNA, 23 bp, Homo sapiens
ttagccaagctgacacaaccagg

SEQ ID NO: 9941 - DNA, 23 bp, Homo sapiens
gactggataattaaagagtaggg

SEQ ID NO: 9942 - DNA, 23 bp, Homo sapiens
atatgctgcttaaaaacatacgg

SEQ ID NO: 9943 - DNA, 23 bp, Homo sapiens
ttaaccattgcagggtcccaggg

SEQ ID NO: 9944 - DNA, 23 bp, Homo sapiens
ttcaatgccatattcaacgttgg

SEQ ID NO: 9945 - DNA, 23 bp, Homo sapiens
gttggagaaagatttctactagg

SEQ ID NO: 9946 - DNA, 23 bp, Homo sapiens
gatatctttgctgagatgcatgg

SEQ ID NO: 9947 - DNA, 23 bp, Homo sapiens
ggaaagtaagttaagcactaagg

SEQ ID NO: 9948 - DNA, 23 bp, Homo sapiens
ggactgattccaaaggtgtaggg

SEQ ID NO: 9949 - DNA, 23 bp, Homo sapiens
ttaaagagtagggaagcattggg

SEQ ID NO: 9950 - DNA, 23 bp, Homo sapiens
tgtctccctctgtggaagggggg

SEQ ID NO: 9951 - DNA, 23 bp, Homo sapiens
cctaaatgagaagtcccattggg

SEQ ID NO: 9952 - DNA, 23 bp, Homo sapiens
gattgagttgttatttatcgagg

SEQ ID NO: 9953 - DNA, 23 bp, Homo sapiens
agtaggtatggttaattggaagg

SEQ ID NO: 9954 - DNA, 23 bp, Homo sapiens
gagggacaagttttcccagaagg

SEQ ID NO: 9955 - DNA, 23 bp, Homo sapiens
ttacaataactggaatgaaaggg

SEQ ID NO: 9956 - DNA, 23 bp, Homo sapiens
caatggttaacgtatttcacagg

SEQ ID NO: 9957 - DNA, 23 bp, Homo sapiens
gaaaggggaagagtagagagagg

SEQ ID NO: 9958 - DNA, 23 bp, Homo sapiens
aatagatctagttttaccctagg

SEQ ID NO: 9959 - DNA, 23 bp, Homo sapiens
ctgtttggagaactgttggaggg

SEQ ID NO: 9960 - DNA, 23 bp, Homo sapiens
tgtagagtatgagagggtaaagg

SEQ ID NO: 9961 - DNA, 23 bp, Homo sapiens
gaacaattccaggaagagctagg

SEQ ID NO: 9962 - DNA, 23 bp, Homo sapiens
aactgcatgacccagaggatggg

SEQ ID NO: 9963 - DNA, 23 bp, Homo sapiens
accatgggtcagaaacttgacgg

SEQ ID NO: 9964 - DNA, 23 bp, Homo sapiens
cctatgcttaattacttcaacgg

SEQ ID NO: 9965 - DNA, 23 bp, Homo sapiens
gatccttttggaacccgggttgg

SEQ ID NO: 9966 - DNA, 23 bp, Homo sapiens
atacataagttcattagcaatgg

SEQ ID NO: 9967 - DNA, 23 bp, Homo sapiens
agtaaatcaattagaaaggaggg

SEQ ID NO: 9968 - DNA, 23 bp, Homo sapiens
atcttccccccttccacagaggg

SEQ ID NO: 9969 - DNA, 23 bp, Homo sapiens
caaaacctctttaattagagagg

SEQ ID NO: 9970 - DNA, 23 bp, Homo sapiens
gaaagaatcaggagtccgtaagg

SEQ ID NO: 9971 - DNA, 23 bp, Homo sapiens
aggaaatcagagatgtttgaagg

SEQ ID NO: 9972 - DNA, 23 bp, Homo sapiens
gagatagtctaaatcaaatgagg

SEQ ID NO: 9973 - DNA, 23 bp, Homo sapiens
tctatgaaaccaaggtaagatgg

SEQ ID NO: 9974 - DNA, 23 bp, Homo sapiens
gtatgcgaacaaaacttacatgg

SEQ ID NO: 9975 - DNA, 23 bp, Homo sapiens
gcttttatctgcaaatgaagtgg

SEQ ID NO: 9976 - DNA, 23 bp, Homo sapiens
attcttagtaaagtcttccctgg

SEQ ID NO: 9977 - DNA, 23 bp, Homo sapiens
attacagaatattattaaagggg

SEQ ID NO: 9978 - DNA, 23 bp, Homo sapiens
ggattttattccattggaggagg

SEQ ID NO: 9979 - DNA, 23 bp, Homo sapiens
ttaatactaatagaggtgtcagg

SEQ ID NO: 9980 - DNA, 23 bp, Homo sapiens
atctttctgtatgtgcccaatgg

SEQ ID NO: 9981 - DNA, 23 bp, Homo sapiens
gttgggctctaagtctctacagg

SEQ ID NO: 9982 - DNA, 23 bp, Homo sapiens
attgaagacaagctctgaaaggg

SEQ ID NO: 9983 - DNA, 23 bp, Homo sapiens
ccataaataataacaaattgagg

SEQ ID NO: 9984 - DNA, 23 bp, Homo sapiens
acacgtgagaaagtgagaaatgg

SEQ ID NO: 9985 - DNA, 23 bp, Homo sapiens
agcactaaggaatatattagtgg

SEQ ID NO: 9986 - DNA, 23 bp, Homo sapiens
gtactctccctgagtgccaatgg

SEQ ID NO: 9987 - DNA, 23 bp, Homo sapiens
tggttatctccacacaaagaagg

SEQ ID NO: 9988 - DNA, 23 bp, Homo sapiens
agagaagtcaacatgcttgtggg

SEQ ID NO: 9989 - DNA, 23 bp, Homo sapiens
gcacagaagtgtgtttcaaaggg

SEQ ID NO: 9990 - DNA, 23 bp, Homo sapiens
ggagtcagtcacttagagccagg

SEQ ID NO: 9991 - DNA, 23 bp, Homo sapiens
ccttttatacaaagatcgtatgg

SEQ ID NO: 9992 - DNA, 23 bp, Homo sapiens
ttctgtctgcttaccctggaggg

SEQ ID NO: 9993 - DNA, 23 bp, Homo sapiens
tgaaagggaagaactccaacagg

SEQ ID NO: 9994 - DNA, 23 bp, Homo sapiens
tatgtgtgcaatgtataagtagg

SEQ ID NO: 9995 - DNA, 23 bp, Homo sapiens
cgttgaagtaattaagcataggg

SEQ ID NO: 9996 - DNA, 23 bp, Homo sapiens
ctgtggacatattttctcaaggg

SEQ ID NO: 9997 - DNA, 23 bp, Homo sapiens
ttggtttcatagactgggaaggg

SEQ ID NO: 9998 - DNA, 23 bp, Homo sapiens
tagcaaccaggcagaatgaatgg

SEQ ID NO: 9999 - DNA, 23 bp, Homo sapiens
cttccaacccgggttccaaaagg

SEQ ID NO: 10000 - DNA, 23 bp, Homo sapiens
attaaaatgtcttctcacttcgg

SEQ ID NO: 10001 - DNA, 23 bp, Homo sapiens
tatcagaactacgtgccaactgg

SEQ ID NO: 10002 - DNA, 23 bp, Homo sapiens
aagagatctttggagccaccagg

SEQ ID NO: 10003 - DNA, 23 bp, Homo sapiens
ggatagagtctgataacattcgg

SEQ ID NO: 10004 - DNA, 23 bp, Homo sapiens
tgatggagtgaaaagcataatgg

SEQ ID NO: 10005 - DNA, 23 bp, Homo sapiens
agtgcagcttccatagactttgg

SEQ ID NO: 10006 - DNA, 23 bp, Homo sapiens
aagtttaaattgcctcccacagg

SEQ ID NO: 10007 - DNA, 23 bp, Homo sapiens
agaagggagtgaagctggagagg

SEQ ID NO: 10008 - DNA, 23 bp, Homo sapiens
tggaaactcaactttctcctggg

SEQ ID NO: 10009 - DNA, 23 bp, Homo sapiens
tttatttatcataaggacatagg

SEQ ID NO: 10010 - DNA, 23 bp, Homo sapiens
ccagcagaagtatgaagtaaagg

SEQ ID NO: 10011 - DNA, 23 bp, Homo sapiens
aggaattagttataaagccaagg

SEQ ID NO: 10012 - DNA, 23 bp, Homo sapiens
gaactatctgtattcccttacgg

SEQ ID NO: 10013 - DNA, 23 bp, Homo sapiens
gtgtgtctccctctgtggaaggg

SEQ ID NO: 10014 - DNA, 23 bp, Homo sapiens
tcttcatgacagtttatgctggg

SEQ ID NO: 10015 - DNA, 23 bp, Homo sapiens
ggaaattaagggaaattccaagg

SEQ ID NO: 10016 - DNA, 23 bp, Homo sapiens
tgaggcacgtttgagtttcaggg

SEQ ID NO: 10017 - DNA, 23 bp, Homo sapiens
aaagagtcgtgggtgacaactgg

SEQ ID NO: 10018 - DNA, 23 bp, Homo sapiens
ctagtctcttaatttcaagttgg

SEQ ID NO: 10019 - DNA, 23 bp, Homo sapiens
acacaatccattctccaaacagg

SEQ ID NO: 10020 - DNA, 23 bp, Homo sapiens
gtaaataaggataccctaatggg

SEQ ID NO: 10021 - DNA, 23 bp, Homo sapiens
agtttccaattattaattcaggg

SEQ ID NO: 10022 - DNA, 23 bp, Homo sapiens
cagtggatatattaaaatgatgg

SEQ ID NO: 10023 - DNA, 23 bp, Homo sapiens
attaggtccttcaaataacttgg

SEQ ID NO: 10024 - DNA, 23 bp, Homo sapiens
acttacctctctaattaaagagg

SEQ ID NO: 10025 - DNA, 23 bp, Homo sapiens
cctctctgcttgtttccacatgg

SEQ ID NO: 10026 - DNA, 23 bp, Homo sapiens
ctgcagtgaattggaggtggtgg

SEQ ID NO: 10027 - DNA, 23 bp, Homo sapiens
tggtagtgtgtcacagaagctgg

SEQ ID NO: 10028 - DNA, 23 bp, Homo sapiens
gaaggtagacataaaattagtgg

SEQ ID NO: 10029 - DNA, 23 bp, Homo sapiens
aagtacacgtcagattgaaatgg

SEQ ID NO: 10030 - DNA, 23 bp, Homo sapiens
tggtctgttttttccctccaggg

SEQ ID NO: 10031 - DNA, 23 bp, Homo sapiens
gcttcagatgatacaaaaacggg

SEQ ID NO: 10032 - DNA, 23 bp, Homo sapiens
ataattccaaagtaaatcactgg

SEQ ID NO: 10033 - DNA, 23 bp, Homo sapiens
atcattcaatttgtatgcaaggg

SEQ ID NO: 10034 - DNA, 23 bp, Homo sapiens
ttttgatctcacttgagagttgg

SEQ ID NO: 10035 - DNA, 23 bp, Homo sapiens
tattcttgttcctcctccaatgg

SEQ ID NO: 10036 - DNA, 23 bp, Homo sapiens
gctgctattaatactaatagagg

SEQ ID NO: 10037 - DNA, 23 bp, Homo sapiens
ataggcttcctttgttttgacgg

SEQ ID NO: 10038 - DNA, 23 bp, Homo sapiens
ttgtatgtttccttttaaaacgg

SEQ ID NO: 10039 - DNA, 23 bp, Homo sapiens
ctgactcataaatatgagatagg

SEQ ID NO: 10040 - DNA, 23 bp, Homo sapiens
tttggactcttctcacctgttgg

SEQ ID NO: 10041 - DNA, 23 bp, Homo sapiens
gataaagtaaaagccacaattgg

SEQ ID NO: 10042 - DNA, 23 bp, Homo sapiens
ttttcagcatcaaaaataagtgg

SEQ ID NO: 10043 - DNA, 23 bp, Homo sapiens
ataatgtgtccctacacctttgg

SEQ ID NO: 10044 - DNA, 23 bp, Homo sapiens
catacgatctttgtataaaaggg

SEQ ID NO: 10045 - DNA, 23 bp, Homo sapiens
ttaacctgcccaggaatagatgg

SEQ ID NO: 10046 - DNA, 23 bp, Homo sapiens
tgtttatagacaacgcttagtgg

SEQ ID NO: 10047 - DNA, 23 bp, Homo sapiens
actaaaatctgaaagttgtatgg

SEQ ID NO: 10048 - DNA, 23 bp, Homo sapiens
aacatactaagtatataattcgg

SEQ ID NO: 10049 - DNA, 23 bp, Homo sapiens
aaaggcccagtgatttactttgg

SEQ ID NO: 10050 - DNA, 23 bp, Homo sapiens
tattttttgctgtcttaggttgg

SEQ ID NO: 10051 - DNA, 23 bp, Homo sapiens
ctttcaggtttctaaggatgagg

SEQ ID NO: 10052 - DNA, 23 bp, Homo sapiens
tccttctgccttattcctatggg

SEQ ID NO: 10053 - DNA, 23 bp, Homo sapiens
actgaacgaagatagcaaaaagg

SEQ ID NO: 10054 - DNA, 23 bp, Homo sapiens
tctattcctgggcaggttaaggg

SEQ ID NO: 10055 - DNA, 23 bp, Homo sapiens
gctaaaggagattttaagctagg

SEQ ID NO: 10056 - DNA, 23 bp, Homo sapiens
aagatatacttgaagaatagagg

SEQ ID NO: 10057 - DNA, 23 bp, Homo sapiens
gcttgaattgtgtaagaattggg

SEQ ID NO: 10058 - DNA, 23 bp, Homo sapiens
gagaggcatggaagacttatggg

SEQ ID NO: 10059 - DNA, 23 bp, Homo sapiens
gcagcactattttccctgttagg

SEQ ID NO: 10060 - DNA, 23 bp, Homo sapiens
agaggctctgccaagtatattgg

SEQ ID NO: 10061 - DNA, 23 bp, Homo sapiens
gcatgtagacttaaaccttctgg

SEQ ID NO: 10062 - DNA, 23 bp, Homo sapiens
tctgtctgtgaagattttaaggg

SEQ ID NO: 10063 - DNA, 23 bp, Homo sapiens
tacacagtacagtaatttagtgg

SEQ ID NO: 10064 - DNA, 23 bp, Homo sapiens
atttttatgggaaattcaactgg

SEQ ID NO: 10065 - DNA, 23 bp, Homo sapiens
tcatgtagcagttattttaaggg

SEQ ID NO: 10066 - DNA, 23 bp, Homo sapiens
gagaaaatatgtccacagtttgg

SEQ ID NO: 10067 - DNA, 23 bp, Homo sapiens
ttaatcatttcaaaattcattgg

SEQ ID NO: 10068 - DNA, 23 bp, Homo sapiens
gtgatactcccataggaataagg

SEQ ID NO: 10069 - DNA, 23 bp, Homo sapiens
tgaggattttaggaaattaaggg

SEQ ID NO: 10070 - DNA, 23 bp, Homo sapiens
ccacgtgttttcacactccttgg

SEQ ID NO: 10071 - DNA, 23 bp, Homo sapiens
cttatgacagcccccataaaggg

SEQ ID NO: 10072 - DNA, 23 bp, Homo sapiens
ttaaaatgttcattaagaattgg

SEQ ID NO: 10073 - DNA, 23 bp, Homo sapiens
ggatggatcccatctattatagg

SEQ ID NO: 10074 - DNA, 23 bp, Homo sapiens
acgaatgtaatgtaatttactgg

SEQ ID NO: 10075 - DNA, 23 bp, Homo sapiens
agaagtacacctataatagatgg

SEQ ID NO: 10076 - DNA, 23 bp, Homo sapiens
tatttacccaaaacaattaaggg

SEQ ID NO: 10077 - DNA, 23 bp, Homo sapiens
ttgtatactttgtaccctaatgg

SEQ ID NO: 10078 - DNA, 23 bp, Homo sapiens
ggtaaataaggataccctaatgg

SEQ ID NO: 10079 - DNA, 23 bp, Homo sapiens
acataaagaagtgtaataatagg

SEQ ID NO: 10080 - DNA, 23 bp, Homo sapiens
atttatcctcctatgtagttagg

SEQ ID NO: 10081 - DNA, 23 bp, Homo sapiens
aattacagaatattattaaaggg

SEQ ID NO: 10082 - DNA, 23 bp, Homo sapiens
tattttatgttgcttccatttgg

SEQ ID NO: 10083 - DNA, 23 bp, Homo sapiens
gattgctcacttctacttagagg

SEQ ID NO: 10084 - DNA, 23 bp, Homo sapiens
gctatccactggcagaatattgg

SEQ ID NO: 10085 - DNA, 23 bp, Homo sapiens
tttgagaccatgcaaatataagg

SEQ ID NO: 10086 - DNA, 23 bp, Homo sapiens
tgagagagagaaatatgatatgg

SEQ ID NO: 10087 - DNA, 23 bp, Homo sapiens
cttttgtgtgtacctcaaaatgg

SEQ ID NO: 10088 - DNA, 23 bp, Homo sapiens
ccttaaatactctcctactatgg

SEQ ID NO: 10089 - DNA, 23 bp, Homo sapiens
gtaatgacacttttgcctattgg

SEQ ID NO: 10090 - DNA, 23 bp, Homo sapiens
gatataaagctttaatttgaggg

SEQ ID NO: 10091 - DNA, 23 bp, Homo sapiens
ccttaaattgggtacttaaaggg

SEQ ID NO: 10092 - DNA, 23 bp, Homo sapiens
tatctttctggtattttcttggg

SEQ ID NO: 10093 - DNA, 23 bp, Homo sapiens
ttacttcaacggatattctatgg

SEQ ID NO: 10094 - DNA, 23 bp, Homo sapiens
ttatctgcataacgaaaatatgg

SEQ ID NO: 10095 - DNA, 23 bp, Homo sapiens
catagtttcttaactatctaagg

SEQ ID NO: 10096 - DNA, 23 bp, Homo sapiens
agacatttgaccgttttaaaagg

SEQ ID NO: 10097 - DNA, 23 bp, Homo sapiens
ttaaatcccttaattgttttggg

SEQ ID NO: 10098 - DNA, 23 bp, Homo sapiens
accatccctgaattaataattgg

SEQ ID NO: 10099 - DNA, 23 bp, Homo sapiens
gataccctaatgggtaaaattgg

SEQ ID NO: 10100 - DNA, 23 bp, Homo sapiens
gctatgttgtaataagttaaagg

SEQ ID NO: 10101 - DNA, 23 bp, Homo sapiens
aatgtcttcatgctttaaattgg

SEQ ID NO: 10102 - DNA, 23 bp, Homo sapiens
gctctgttaatttctgtattagg

SEQ ID NO: 10103 - DNA, 23 bp, Homo sapiens
attctcgtctctgttctttatgg

SEQ ID NO: 10104 - DNA, 23 bp, Homo sapiens
ataatcttcctaccttaatttgg

SEQ ID NO: 10105 - DNA, 23 bp, Homo sapiens
agcctgccgagtgagagtgtggg

SEQ ID NO: 10106 - DNA, 23 bp, Homo sapiens
tacagctgaatggaaccaggtgg

SEQ ID NO: 10107 - DNA, 23 bp, Homo sapiens
actggcttgatgatttccagcgg

SEQ ID NO: 10108 - DNA, 23 bp, Homo sapiens
ttagaataactggaacaatgtgg

SEQ ID NO: 10109 - DNA, 23 bp, Homo sapiens
gaaaatctggagcttctgtgagg

SEQ ID NO: 10110 - DNA, 23 bp, Homo sapiens
agggccaacaagatatcacaagg

SEQ ID NO: 10111 - DNA, 23 bp, Homo sapiens
gttatcttctcctatcagagggg

SEQ ID NO: 10112 - DNA, 23 bp, Homo sapiens
taaatatcaagaaagacaggagg

SEQ ID NO: 10113 - DNA, 23 bp, Homo sapiens
tgactatgtattaagccacctgg

SEQ ID NO: 10114 - DNA, 23 bp, Homo sapiens
aatactggagtacagatgggagg

SEQ ID NO: 10115 - DNA, 23 bp, Homo sapiens
gaagcaaagaatacaacacaggg

SEQ ID NO: 10116 - DNA, 23 bp, Homo sapiens
attactaataagtatataggcgg

SEQ ID NO: 10117 - DNA, 23 bp, Homo sapiens
tgaacatggcaatttcgaggagg

SEQ ID NO: 10118 - DNA, 23 bp, Homo sapiens
tactttgcaagatagacctgtgg

SEQ ID NO: 10119 - DNA, 23 bp, Homo sapiens
tagaagaaaatatagactcgagg

SEQ ID NO: 10120 - DNA, 23 bp, Homo sapiens
aaaattataccatctcagaaggg

SEQ ID NO: 10121 - DNA, 23 bp, Homo sapiens
gctcgtgtcatgaacttgagtgg

SEQ ID NO: 10122 - DNA, 23 bp, Homo sapiens
agtagaatgagaacactatgtgg

SEQ ID NO: 10123 - DNA, 23 bp, Homo sapiens
gaatcacagataacaaagcacgg

SEQ ID NO: 10124 - DNA, 23 bp, Homo sapiens
aatccccttgtgatcaaaggagg

SEQ ID NO: 10125 - DNA, 23 bp, Homo sapiens
tttgaggacgaacgtatgggtgg

SEQ ID NO: 10126 - DNA, 23 bp, Homo sapiens
atagcctcctttgatcacaaggg

SEQ ID NO: 10127 - DNA, 23 bp, Homo sapiens
ccataacgacttgatagggaggg

SEQ ID NO: 10128 - DNA, 23 bp, Homo sapiens
gatttgcattttatcaatagcgg

SEQ ID NO: 10129 - DNA, 23 bp, Homo sapiens
cctttctcagtatttacatgtgg

SEQ ID NO: 10130 - DNA, 23 bp, Homo sapiens
agaggtgctaataaagaaggagg

SEQ ID NO: 10131 - DNA, 23 bp, Homo sapiens
cagtcattctaaagtagtggggg

SEQ ID NO: 10132 - DNA, 23 bp, Homo sapiens
atatcttataatatatgacaggg

SEQ ID NO: 10133 - DNA, 23 bp, Homo sapiens
atttaactattaattcagcaggg

SEQ ID NO: 10134 - DNA, 23 bp, Homo sapiens
tgatactaaaagaatgtgagagg

SEQ ID NO: 10135 - DNA, 23 bp, Homo sapiens
ggaacgtgcacaatcatggatgg

SEQ ID NO: 10136 - DNA, 23 bp, Homo sapiens
atacattgtatttagcctgaggg

SEQ ID NO: 10137 - DNA, 23 bp, Homo sapiens
gaaaatatacttaggatgcacgg

SEQ ID NO: 10138 - DNA, 23 bp, Homo sapiens
ggtaatcaagtgcagatccgagg

SEQ ID NO: 10139 - DNA, 23 bp, Homo sapiens
atatacagctgaatggaaccagg

SEQ ID NO: 10140 - DNA, 23 bp, Homo sapiens
ttatgatgataacatttagaggg

SEQ ID NO: 10141 - DNA, 23 bp, Homo sapiens
aaagctaatgataaagacctggg

SEQ ID NO: 10142 - DNA, 23 bp, Homo sapiens
atttagatgtgatcttcccatgg

SEQ ID NO: 10143 - DNA, 23 bp, Homo sapiens
gtgactgtgtatcaacaaagagg

SEQ ID NO: 10144 - DNA, 23 bp, Homo sapiens
aataacctatataaaccgacagg

SEQ ID NO: 10145 - DNA, 23 bp, Homo sapiens
ggaagaggctatccttcacctgg

SEQ ID NO: 10146 - DNA, 23 bp, Homo sapiens
gccagaagtcattaactgcaagg

SEQ ID NO: 10147 - DNA, 23 bp, Homo sapiens
taaaatactggagtacagatggg

SEQ ID NO: 10148 - DNA, 23 bp, Homo sapiens
gtaactgaacaatatatgaaagg

SEQ ID NO: 10149 - DNA, 23 bp, Homo sapiens
ggtgctttgaaattttcaagtgg

SEQ ID NO: 10150 - DNA, 23 bp, Homo sapiens
tagcctcctttgatcacaagggg

SEQ ID NO: 10151 - DNA, 23 bp, Homo sapiens
gatgagcctcaaccaggtgaagg

SEQ ID NO: 10152 - DNA, 23 bp, Homo sapiens
agtcatagtgctgttttcgaggg

SEQ ID NO: 10153 - DNA, 23 bp, Homo sapiens
gcctcttccactaaggcaggtgg

SEQ ID NO: 10154 - DNA, 23 bp, Homo sapiens
gagtattcagatgatacccttgg

SEQ ID NO: 10155 - DNA, 23 bp, Homo sapiens
atacacagtcacttaaaatgagg

SEQ ID NO: 10156 - DNA, 23 bp, Homo sapiens
atgaccataacgacttgataggg

SEQ ID NO: 10157 - DNA, 23 bp, Homo sapiens
acatgctctgctgttgctagggg

SEQ ID NO: 10158 - DNA, 23 bp, Homo sapiens
tcatttgaggacgaacgtatggg

SEQ ID NO: 10159 - DNA, 23 bp, Homo sapiens
gctaattggaaagggatcctggg

SEQ ID NO: 10160 - DNA, 23 bp, Homo sapiens
taaaagttcctgttatcatgtgg

SEQ ID NO: 10161 - DNA, 23 bp, Homo sapiens
gagagttcaggttgataaagggg

SEQ ID NO: 10162 - DNA, 23 bp, Homo sapiens
aattatttcaagcttttgtgggg

SEQ ID NO: 10163 - DNA, 23 bp, Homo sapiens
attttacatggtgctctgaaggg

SEQ ID NO: 10164 - DNA, 23 bp, Homo sapiens
tcaaagtactcctatttccaagg

SEQ ID NO: 10165 - DNA, 23 bp, Homo sapiens
tgatagcaggagagcccacaggg

SEQ ID NO: 10166 - DNA, 23 bp, Homo sapiens
atttaaaagctgacttctggggg

SEQ ID NO: 10167 - DNA, 23 bp, Homo sapiens
agtagtgggggtacaaaagaggg

SEQ ID NO: 10168 - DNA, 23 bp, Homo sapiens
gagaaagataatattgtcaaggg

SEQ ID NO: 10169 - DNA, 23 bp, Homo sapiens
ctggcttgatgatttccagcggg

SEQ ID NO: 10170 - DNA, 23 bp, Homo sapiens
atagtttttatagtaaaatgggg

SEQ ID NO: 10171 - DNA, 23 bp, Homo sapiens
actggctaaaagcatttgaaagg

SEQ ID NO: 10172 - DNA, 23 bp, Homo sapiens
tttcttactacatcacctgtcgg

SEQ ID NO: 10173 - DNA, 23 bp, Homo sapiens
atataatagataccatacttagg

SEQ ID NO: 10174 - DNA, 23 bp, Homo sapiens
tgctttcccacactctcactcgg

SEQ ID NO: 10175 - DNA, 23 bp, Homo sapiens
ataatttagaatccgagtagtgg

SEQ ID NO: 10176 - DNA, 23 bp, Homo sapiens
tgaaagatacacattttacatgg

SEQ ID NO: 10177 - DNA, 23 bp, Homo sapiens
catgtttagaagccactactcgg

SEQ ID NO: 10178 - DNA, 23 bp, Homo sapiens
agtcagtcattctaaagtagtgg

SEQ ID NO: 10179 - DNA, 23 bp, Homo sapiens
acaattgtgcaagcttgctaagg

SEQ ID NO: 10180 - DNA, 23 bp, Homo sapiens
gtatcaacaaagaggaacatagg

SEQ ID NO: 10181 - DNA, 23 bp, Homo sapiens
tcgtatttgtaaaaatacaatgg

SEQ ID NO: 10182 - DNA, 23 bp, Homo sapiens
tgaaaatcgccatttctcctggg

SEQ ID NO: 10183 - DNA, 23 bp, Homo sapiens
tagttatttcagcatccctgtgg

SEQ ID NO: 10184 - DNA, 23 bp, Homo sapiens
gagttatcttctcctatcagagg

SEQ ID NO: 10185 - DNA, 23 bp, Homo sapiens
aatctggatatacagctgaatgg

SEQ ID NO: 10186 - DNA, 23 bp, Homo sapiens
gaggaacagaggtctgaaagagg

SEQ ID NO: 10187 - DNA, 23 bp, Homo sapiens
agttatttcagcatccctgtggg

SEQ ID NO: 10188 - DNA, 23 bp, Homo sapiens
atgaacttctgttttcaggtagg

SEQ ID NO: 10189 - DNA, 23 bp, Homo sapiens
tcaaatccccttgtgatcaaagg

SEQ ID NO: 10190 - DNA, 23 bp, Homo sapiens
gaaagcttatgaagaactgctgg

SEQ ID NO: 10191 - DNA, 23 bp, Homo sapiens
ttcccatgttttcaagaccaagg

SEQ ID NO: 10192 - DNA, 23 bp, Homo sapiens
tttctcctctaagatgctcaggg

SEQ ID NO: 10193 - DNA, 23 bp, Homo sapiens
aaaaagttgattctgaaagaggg

SEQ ID NO: 10194 - DNA, 23 bp, Homo sapiens
cccagagatgagcctcaaccagg

SEQ ID NO: 10195 - DNA, 23 bp, Homo sapiens
gttagagaagatacagaaagagg

SEQ ID NO: 10196 - DNA, 23 bp, Homo sapiens
tttaccttgatgtttccctcagg

SEQ ID NO: 10197 - DNA, 23 bp, Homo sapiens
ttctgtgagttaatgggagacgg

SEQ ID NO: 10198 - DNA, 23 bp, Homo sapiens
agttatcttctcctatcagaggg

SEQ ID NO: 10199 - DNA, 23 bp, Homo sapiens
taagacagctttgatcaggcagg

SEQ ID NO: 10200 - DNA, 23 bp, Homo sapiens
tcccatgttttcaagaccaaggg

SEQ ID NO: 10201 - DNA, 23 bp, Homo sapiens
gagcacatatttcagtttgtcgg

SEQ ID NO: 10202 - DNA, 23 bp, Homo sapiens
tgaaaagtaattttatccatggg

SEQ ID NO: 10203 - DNA, 23 bp, Homo sapiens
ccacatgtaaatactgagaaagg

SEQ ID NO: 10204 - DNA, 23 bp, Homo sapiens
ttatgaacatggcaatttcgagg

SEQ ID NO: 10205 - DNA, 23 bp, Homo sapiens
atagcctcttccactaaggcagg

SEQ ID NO: 10206 - DNA, 23 bp, Homo sapiens
ggaattgtctctgttaggtgagg

SEQ ID NO: 10207 - DNA, 23 bp, Homo sapiens
ataaaacttcctatttgtgaagg

SEQ ID NO: 10208 - DNA, 23 bp, Homo sapiens
gtgtttactacccagagtatagg

SEQ ID NO: 10209 - DNA, 23 bp, Homo sapiens
attattgatctgattctcacagg

SEQ ID NO: 10210 - DNA, 23 bp, Homo sapiens
tttttaggctgcttgaaaaaggg

SEQ ID NO: 10211 - DNA, 23 bp, Homo sapiens
gtaaaatactggagtacagatgg

SEQ ID NO: 10212 - DNA, 23 bp, Homo sapiens
taagttactcttcagtcaaaggg

SEQ ID NO: 10213 - DNA, 23 bp, Homo sapiens
gaattgtctctgttaggtgaggg

SEQ ID NO: 10214 - DNA, 23 bp, Homo sapiens
ggttattttaaactcatggcagg

SEQ ID NO: 10215 - DNA, 23 bp, Homo sapiens
atttgcattttatcaatagcggg

SEQ ID NO: 10216 - DNA, 23 bp, Homo sapiens
tgttgctaggggtatttcaatgg

SEQ ID NO: 10217 - DNA, 23 bp, Homo sapiens
aagacttcatttacatccacagg

SEQ ID NO: 10218 - DNA, 23 bp, Homo sapiens
aactttttaccaactcccgctgg

SEQ ID NO: 10219 - DNA, 23 bp, Homo sapiens
tgatgagagtaccttgttcgtgg

SEQ ID NO: 10220 - DNA, 23 bp, Homo sapiens
gtatctttcagctaagagatagg

SEQ ID NO: 10221 - DNA, 23 bp, Homo sapiens
agaaagaggaggcttttaagagg

SEQ ID NO: 10222 - DNA, 23 bp, Homo sapiens
acaggcagagtaaataaaatggg

SEQ ID NO: 10223 - DNA, 23 bp, Homo sapiens
ttttacctgctaattggaaaggg

SEQ ID NO: 10224 - DNA, 23 bp, Homo sapiens
gattcttctgtgactgactaggg

SEQ ID NO: 10225 - DNA, 23 bp, Homo sapiens
tgacagagtgaaacatcttaagg

SEQ ID NO: 10226 - DNA, 23 bp, Homo sapiens
gataatattgtcaagggcagagg

SEQ ID NO: 10227 - DNA, 23 bp, Homo sapiens
ttggtttgtgtgttaggcatggg

SEQ ID NO: 10228 - DNA, 23 bp, Homo sapiens
aggatccctttccaattagcagg

SEQ ID NO: 10229 - DNA, 23 bp, Homo sapiens
ggtcttgaaaacatgggaaaggg

SEQ ID NO: 10230 - DNA, 23 bp, Homo sapiens
gcactttaagagagcattgtggg

SEQ ID NO: 10231 - DNA, 23 bp, Homo sapiens
ttgtttgctgtgatttttgaggg

SEQ ID NO: 10232 - DNA, 23 bp, Homo sapiens
atattctaggacacaatcttggg

SEQ ID NO: 10233 - DNA, 23 bp, Homo sapiens
aatatcttataatatatgacagg

SEQ ID NO: 10234 - DNA, 23 bp, Homo sapiens
ctaaaagatgaaaacacaaccgg

SEQ ID NO: 10235 - DNA, 23 bp, Homo sapiens
atacttattagtaatttcaatgg

SEQ ID NO: 10236 - DNA, 23 bp, Homo sapiens
ttaagaggtgctaataaagaagg

SEQ ID NO: 10237 - DNA, 23 bp, Homo sapiens
aatggtctctgacagtctatagg

SEQ ID NO: 10238 - DNA, 23 bp, Homo sapiens
tctggctttgggctcttcctcgg

SEQ ID NO: 10239 - DNA, 23 bp, Homo sapiens
aagcaccctgagcatcttagagg

SEQ ID NO: 10240 - DNA, 23 bp, Homo sapiens
ccctccctatcaagtcgttatgg

SEQ ID NO: 10241 - DNA, 23 bp, Homo sapiens
tgagagttcaggttgataaaggg

SEQ ID NO: 10242 - DNA, 23 bp, Homo sapiens
gttcaaaatgtaactcttaaggg

SEQ ID NO: 10243 - DNA, 23 bp, Homo sapiens
ataggtaaccacatgataacagg

SEQ ID NO: 10244 - DNA, 23 bp, Homo sapiens
acaaggaaaaaattatgcttagg

SEQ ID NO: 10245 - DNA, 23 bp, Homo sapiens
ataaaatgcaaatcgttcatagg

SEQ ID NO: 10246 - DNA, 23 bp, Homo sapiens
tattttctcattgaagactttgg

SEQ ID NO: 10247 - DNA, 23 bp, Homo sapiens
agaattataaatactaaaatggg

SEQ ID NO: 10248 - DNA, 23 bp, Homo sapiens
tttcaagtatacttctttgaagg

SEQ ID NO: 10249 - DNA, 23 bp, Homo sapiens
acttgaacgtgaagtggctttgg

SEQ ID NO: 10250 - DNA, 23 bp, Homo sapiens
ctatcttgcaaagtaaaaactgg

SEQ ID NO: 10251 - DNA, 23 bp, Homo sapiens
atttcatgtcccattttagtagg

SEQ ID NO: 10252 - DNA, 23 bp, Homo sapiens
ttagccagttagcatatcatagg

SEQ ID NO: 10253 - DNA, 23 bp, Homo sapiens
agacatgctctgctgttgctagg

SEQ ID NO: 10254 - DNA, 23 bp, Homo sapiens
gttgtagcaagtcatgaaaatgg

SEQ ID NO: 10255 - DNA, 23 bp, Homo sapiens
gagcacatggtaacgcaaattgg

SEQ ID NO: 10256 - DNA, 23 bp, Homo sapiens
gtgaatgatggggaaagtttagg

SEQ ID NO: 10257 - DNA, 23 bp, Homo sapiens
cattccttgtgatatcttgttgg

SEQ ID NO: 10258 - DNA, 23 bp, Homo sapiens
catgcatctttgtatatgattgg

SEQ ID NO: 10259 - DNA, 23 bp, Homo sapiens
gatgaccataacgacttgatagg

SEQ ID NO: 10260 - DNA, 23 bp, Homo sapiens
gctgttttcgagggtaaaattgg

SEQ ID NO: 10261 - DNA, 23 bp, Homo sapiens
tctgcagttgcatttaagatagg

SEQ ID NO: 10262 - DNA, 23 bp, Homo sapiens
catcacctgtcggtttatatagg

SEQ ID NO: 10263 - DNA, 23 bp, Homo sapiens
gagaaattggaagcattaactgg

SEQ ID NO: 10264 - DNA, 23 bp, Homo sapiens
tatgtgctcattctacttaaagg

SEQ ID NO: 10265 - DNA, 23 bp, Homo sapiens
ataacagagataggagaaattgg

SEQ ID NO: 10266 - DNA, 23 bp, Homo sapiens
tcaatggatattattcaaaaagg

SEQ ID NO: 10267 - DNA, 23 bp, Homo sapiens
ttttaggctttcattaaaaatgg

SEQ ID NO: 10268 - DNA, 23 bp, Homo sapiens
ttttaatgaaagcctaaaaatgg

SEQ ID NO: 10269 - DNA, 23 bp, Homo sapiens
atataacatttaccttttaatgg

SEQ ID NO: 10270 - DNA, 23 bp, Homo sapiens
tatttctgctaaattatttatgg

SEQ ID NO: 10271 - DNA, 23 bp, Homo sapiens
aagaatgtatgtgtcttacgtgg

SEQ ID NO: 10272 - DNA, 23 bp, Homo sapiens
acttctgaggaaactatacgtgg

SEQ ID NO: 10273 - DNA, 23 bp, Homo sapiens
gcagataccagggaacactgggg

SEQ ID NO: 10274 - DNA, 23 bp, Homo sapiens
ctgttgttgtgggaaatgagtgg

SEQ ID NO: 10275 - DNA, 23 bp, Homo sapiens
gtgataatacagtttctaggggg

SEQ ID NO: 10276 - DNA, 23 bp, Homo sapiens
aaaacatttcaaaaaaaacgtgg

SEQ ID NO: 10277 - DNA, 23 bp, Homo sapiens
atatgctgcctgctcaacaaggg

SEQ ID NO: 10278 - DNA, 23 bp, Homo sapiens
cataatgctactcaggatggcgg

SEQ ID NO: 10279 - DNA, 23 bp, Homo sapiens
agataccagggaacactgggggg

SEQ ID NO: 10280 - DNA, 23 bp, Homo sapiens
ctaagtataaaagaagtccgtgg

SEQ ID NO: 10281 - DNA, 23 bp, Homo sapiens
ggagtacctactatgtaccatgg

SEQ ID NO: 10282 - DNA, 23 bp, Homo sapiens
tctcttgtgtgaaaattaggggg

SEQ ID NO: 10283 - DNA, 23 bp, Homo sapiens
agtcgttgaggtaataacgttgg

SEQ ID NO: 10284 - DNA, 23 bp, Homo sapiens
attctattagatactgccagtgg

SEQ ID NO: 10285 - DNA, 23 bp, Homo sapiens
aataaatatattgcacccagagg

SEQ ID NO: 10286 - DNA, 23 bp, Homo sapiens
agcccaaaagtacagttgagtgg

SEQ ID NO: 10287 - DNA, 23 bp, Homo sapiens
tgaagtacttgcatggaaggtgg

SEQ ID NO: 10288 - DNA, 23 bp, Homo sapiens
gtgaaacgtcaacatgaaccagg

SEQ ID NO: 10289 - DNA, 23 bp, Homo sapiens
aatcaaactgcccagtactgagg

SEQ ID NO: 10290 - DNA, 23 bp, Homo sapiens
agatctctgtaggtacatgaggg

SEQ ID NO: 10291 - DNA, 23 bp, Homo sapiens
catctataatagcaaaaaggggg

SEQ ID NO: 10292 - DNA, 23 bp, Homo sapiens
ttattcacagactatttcagggg

SEQ ID NO: 10293 - DNA, 23 bp, Homo sapiens
gaggaacagccatttacatgagg

SEQ ID NO: 10294 - DNA, 23 bp, Homo sapiens
gcattatactaagtgtcatgtgg

SEQ ID NO: 10295 - DNA, 23 bp, Homo sapiens
acctgtgaagacaagttctgagg

SEQ ID NO: 10296 - DNA, 23 bp, Homo sapiens
acttaatgagggcaagtgagagg

SEQ ID NO: 10297 - DNA, 23 bp, Homo sapiens
agcagttagaagtccatgaaggg

SEQ ID NO: 10298 - DNA, 23 bp, Homo sapiens
ttattacaaaacaggaatgacgg

SEQ ID NO: 10299 - DNA, 23 bp, Homo sapiens
taagctttggatcataaccctgg

SEQ ID NO: 10300 - DNA, 23 bp, Homo sapiens
atctcattaaaaatatatcaggg

SEQ ID NO: 10301 - DNA, 23 bp, Homo sapiens
cagataccagggaacactggggg

SEQ ID NO: 10302 - DNA, 23 bp, Homo sapiens
gtgcaagttagcaaaaccacagg

SEQ ID NO: 10303 - DNA, 23 bp, Homo sapiens
gctactcattcatgatgaagggg

SEQ ID NO: 10304 - DNA, 23 bp, Homo sapiens
tatgtagctcctgtaggccacgg

SEQ ID NO: 10305 - DNA, 23 bp, Homo sapiens
gctaactttggcagataccaggg

SEQ ID NO: 10306 - DNA, 23 bp, Homo sapiens
actgatgcctttcatgaccaagg

SEQ ID NO: 10307 - DNA, 23 bp, Homo sapiens
ccaaaaggaagagcctctgtggg

SEQ ID NO: 10308 - DNA, 23 bp, Homo sapiens
tatattgcaacattttttggggg

SEQ ID NO: 10309 - DNA, 23 bp, Homo sapiens
atgtaaaaagaatatatacatgg

SEQ ID NO: 10310 - DNA, 23 bp, Homo sapiens
aatagaacattagactatcaggg

SEQ ID NO: 10311 - DNA, 23 bp, Homo sapiens
ccatacatagcatgaaagcatgg

SEQ ID NO: 10312 - DNA, 23 bp, Homo sapiens
tccatagcctaagcttgggaagg

SEQ ID NO: 10313 - DNA, 23 bp, Homo sapiens
aaatgacatagcatattccatgg

SEQ ID NO: 10314 - DNA, 23 bp, Homo sapiens
tgaaagtacaaaatttaccatgg

SEQ ID NO: 10315 - DNA, 23 bp, Homo sapiens
aaaagtaatacccctagtgaggg

SEQ ID NO: 10316 - DNA, 23 bp, Homo sapiens
ttaatggggaaacagagctatgg

SEQ ID NO: 10317 - DNA, 23 bp, Homo sapiens
tctttactggtagaacaaaaggg

SEQ ID NO: 10318 - DNA, 23 bp, Homo sapiens
atgagtggtttatacaagagtgg

SEQ ID NO: 10319 - DNA, 23 bp, Homo sapiens
accatggttacaatgtagaaggg

SEQ ID NO: 10320 - DNA, 23 bp, Homo sapiens
ttagaatatgtagctcctgtagg

SEQ ID NO: 10321 - DNA, 23 bp, Homo sapiens
aagctctgatgggagctggaagg

SEQ ID NO: 10322 - DNA, 23 bp, Homo sapiens
gcagttctgaagtacttgcatgg

SEQ ID NO: 10323 - DNA, 23 bp, Homo sapiens
tgtatggttgacctttctcaggg

SEQ ID NO: 10324 - DNA, 23 bp, Homo sapiens
gaatcttccttcccaagcttagg

SEQ ID NO: 10325 - DNA, 23 bp, Homo sapiens
tcccttctacattgtaaccatgg

SEQ ID NO: 10326 - DNA, 23 bp, Homo sapiens
aacccagaaaactttatcaaggg

SEQ ID NO: 10327 - DNA, 23 bp, Homo sapiens
ttctcattttaattgaagagagg

SEQ ID NO: 10328 - DNA, 23 bp, Homo sapiens
aagcagttagaagtccatgaagg

SEQ ID NO: 10329 - DNA, 23 bp, Homo sapiens
agattttgtcagatgggtgaggg

SEQ ID NO: 10330 - DNA, 23 bp, Homo sapiens
aaagtgctcaaagctctgatggg

SEQ ID NO: 10331 - DNA, 23 bp, Homo sapiens
ggaaactgttaacttaatgaggg

SEQ ID NO: 10332 - DNA, 23 bp, Homo sapiens
acatagtaggtactccagaatgg

SEQ ID NO: 10333 - DNA, 23 bp, Homo sapiens
ctataatagcaaaaagggggagg

SEQ ID NO: 10334 - DNA, 23 bp, Homo sapiens
acattagactatcagggcagagg

SEQ ID NO: 10335 - DNA, 23 bp, Homo sapiens
ccctctgaaatacacctgaaggg

SEQ ID NO: 10336 - DNA, 23 bp, Homo sapiens
tatgctgagaagacaggataggg

SEQ ID NO: 10337 - DNA, 23 bp, Homo sapiens
atatgctgagaagacaggatagg

SEQ ID NO: 10338 - DNA, 23 bp, Homo sapiens
gcttcatagacatttagaaacgg

SEQ ID NO: 10339 - DNA, 23 bp, Homo sapiens
tagtggcataataatatgagtgg

SEQ ID NO: 10340 - DNA, 23 bp, Homo sapiens
cctataggaaatgtctccactgg

SEQ ID NO: 10341 - DNA, 23 bp, Homo sapiens
gtctgtatacaaatgtggcatgg

SEQ ID NO: 10342 - DNA, 23 bp, Homo sapiens
cctttcaccataatttctagagg

SEQ ID NO: 10343 - DNA, 23 bp, Homo sapiens
aaatatatcagggaagaaggagg

SEQ ID NO: 10344 - DNA, 23 bp, Homo sapiens
ctctcttgtgtgaaaattagggg

SEQ ID NO: 10345 - DNA, 23 bp, Homo sapiens
tggagttttaggacaacctaggg

SEQ ID NO: 10346 - DNA, 23 bp, Homo sapiens
agtaatgatccatttcctctggg

SEQ ID NO: 10347 - DNA, 23 bp, Homo sapiens
aaccaaatacagtcagtcatggg

SEQ ID NO: 10348 - DNA, 23 bp, Homo sapiens
atttctgattaattcagtgtagg

SEQ ID NO: 10349 - DNA, 23 bp, Homo sapiens
tcaatccagcatcagtctatcgg

SEQ ID NO: 10350 - DNA, 23 bp, Homo sapiens
atctcacatgattataaatgtgg

SEQ ID NO: 10351 - DNA, 23 bp, Homo sapiens
gctttaaaatacttgggcagggg

SEQ ID NO: 10352 - DNA, 23 bp, Homo sapiens
tgaaaggccttggtcatgaaagg

SEQ ID NO: 10353 - DNA, 23 bp, Homo sapiens
aaagaactggaacatccataagg

SEQ ID NO: 10354 - DNA, 23 bp, Homo sapiens
gcaaccagattttgtcagatggg

SEQ ID NO: 10355 - DNA, 23 bp, Homo sapiens
tctgtgggtgtgtgtgagcacgg

SEQ ID NO: 10356 - DNA, 23 bp, Homo sapiens
cattagactatcagggcagaggg

SEQ ID NO: 10357 - DNA, 23 bp, Homo sapiens
tatctccatagcctaagcttggg

SEQ ID NO: 10358 - DNA, 23 bp, Homo sapiens
tggtaagtaaaactacatgcagg

SEQ ID NO: 10359 - DNA, 23 bp, Homo sapiens
aatttatattgccctcactaggg

SEQ ID NO: 10360 - DNA, 23 bp, Homo sapiens
ttgcttccttaagcattaggagg

SEQ ID NO: 10361 - DNA, 23 bp, Homo sapiens
atactttgcaccatcaaatgagg

SEQ ID NO: 10362 - DNA, 23 bp, Homo sapiens
ttttgctgaactttaagtgaggg

SEQ ID NO: 10363 - DNA, 23 bp, Homo sapiens
gtagctgtgcatattgaaaaggg

SEQ ID NO: 10364 - DNA, 23 bp, Homo sapiens
ttgaaaataaaaacgcaaaaggg

SEQ ID NO: 10365 - DNA, 23 bp, Homo sapiens
tagggatttgataaacacatagg

SEQ ID NO: 10366 - DNA, 23 bp, Homo sapiens
ggctactcattcatgatgaaggg

SEQ ID NO: 10367 - DNA, 23 bp, Homo sapiens
aaaatgtctctagtaaaaagagg

SEQ ID NO: 10368 - DNA, 23 bp, Homo sapiens
ctttcagtctgtgggttcagggg

SEQ ID NO: 10369 - DNA, 23 bp, Homo sapiens
aactacagtgaagtaccaatagg

SEQ ID NO: 10370 - DNA, 23 bp, Homo sapiens
taggtactccagaatggtaatgg

SEQ ID NO: 10371 - DNA, 23 bp, Homo sapiens
gcagtatccgttaaaatctaggg

SEQ ID NO: 10372 - DNA, 23 bp, Homo sapiens
tttagaatgaaattccaagatgg

SEQ ID NO: 10373 - DNA, 23 bp, Homo sapiens
ccagtggagacatttcctatagg

SEQ ID NO: 10374 - DNA, 23 bp, Homo sapiens
agacttcttttttaaatgagagg

SEQ ID NO: 10375 - DNA, 23 bp, Homo sapiens
atatttttaatgagatacaatgg

SEQ ID NO: 10376 - DNA, 23 bp, Homo sapiens
cttttggcttcagtgtacattgg

SEQ ID NO: 10377 - DNA, 23 bp, Homo sapiens
gaatttatgccccaaaatgcagg

SEQ ID NO: 10378 - DNA, 23 bp, Homo sapiens
ggtcgaactgatacgtcattagg

SEQ ID NO: 10379 - DNA, 23 bp, Homo sapiens
atatctccatagcctaagcttgg

SEQ ID NO: 10380 - DNA, 23 bp, Homo sapiens
gctaaaactctcatgatcactgg

SEQ ID NO: 10381 - DNA, 23 bp, Homo sapiens
tgaattatgttatttgaggtggg

SEQ ID NO: 10382 - DNA, 23 bp, Homo sapiens
agaacgtctctagaaacataagg

SEQ ID NO: 10383 - DNA, 23 bp, Homo sapiens
gcaacatcacgctgtgctatggg

SEQ ID NO: 10384 - DNA, 23 bp, Homo sapiens
tcactttgtgtccctgagaaagg

SEQ ID NO: 10385 - DNA, 23 bp, Homo sapiens
tccttcccaagcttaggctatgg

SEQ ID NO: 10386 - DNA, 23 bp, Homo sapiens
aaaaagttacttaaaagtaaagg

SEQ ID NO: 10387 - DNA, 23 bp, Homo sapiens
tgactaatatgggatatagaagg

SEQ ID NO: 10388 - DNA, 23 bp, Homo sapiens
attatttttttctttctagaggg

SEQ ID NO: 10389 - DNA, 23 bp, Homo sapiens
gcctgctttaaaactatacatgg

SEQ ID NO: 10390 - DNA, 23 bp, Homo sapiens
ttgtgtttcaaatgaattgaggg

SEQ ID NO: 10391 - DNA, 23 bp, Homo sapiens
tgttttgtgttattctaccctgg

SEQ ID NO: 10392 - DNA, 23 bp, Homo sapiens
gtctctttctttcacacacatgg

SEQ ID NO: 10393 - DNA, 23 bp, Homo sapiens
atccaaagcttacatattgacgg

SEQ ID NO: 10394 - DNA, 23 bp, Homo sapiens
ggaaactatacgtggttaagagg

SEQ ID NO: 10395 - DNA, 23 bp, Homo sapiens
tgttcttttgagatctctgtagg

SEQ ID NO: 10396 - DNA, 23 bp, Homo sapiens
catattccatggtacatagtagg

SEQ ID NO: 10397 - DNA, 23 bp, Homo sapiens
gagtgaacaagtttaagaacagg

SEQ ID NO: 10398 - DNA, 23 bp, Homo sapiens
tagaagggaacctcatttgatgg

SEQ ID NO: 10399 - DNA, 23 bp, Homo sapiens
tgttccttgaacgacaaaaacgg

SEQ ID NO: 10400 - DNA, 23 bp, Homo sapiens
acatgaaccaggtattaaacagg

SEQ ID NO: 10401 - DNA, 23 bp, Homo sapiens
aataatacactgaaaggccttgg

SEQ ID NO: 10402 - DNA, 23 bp, Homo sapiens
ttatttagatgtatgttgcttgg

SEQ ID NO: 10403 - DNA, 23 bp, Homo sapiens
tggcagataccagggaacactgg

SEQ ID NO: 10404 - DNA, 23 bp, Homo sapiens
ttaacagtttcctgagaccaggg

SEQ ID NO: 10405 - DNA, 23 bp, Homo sapiens
ttatgtcagcattaattggttgg

SEQ ID NO: 10406 - DNA, 23 bp, Homo sapiens
tgatttagataatcttcttaggg

SEQ ID NO: 10407 - DNA, 23 bp, Homo sapiens
attaacacagtcaaccaaacagg

SEQ ID NO: 10408 - DNA, 23 bp, Homo sapiens
acggatactgcagagcctattgg

SEQ ID NO: 10409 - DNA, 23 bp, Homo sapiens
aacctgtccctagattttaacgg

SEQ ID NO: 10410 - DNA, 23 bp, Homo sapiens
ttttcctttctatacaaaaaggg

SEQ ID NO: 10411 - DNA, 23 bp, Homo sapiens
atcataatacttttttcaaacgg

SEQ ID NO: 10412 - DNA, 23 bp, Homo sapiens
tgagttcattggaagaaaatggg

SEQ ID NO: 10413 - DNA, 23 bp, Homo sapiens
cttattccttcctcagtactggg

SEQ ID NO: 10414 - DNA, 23 bp, Homo sapiens
acatttttaattttaaaaatggg

SEQ ID NO: 10415 - DNA, 23 bp, Homo sapiens
ttttttgcctgtttaatacctgg

SEQ ID NO: 10416 - DNA, 23 bp, Homo sapiens
gatcatttctttcagtctgtggg

SEQ ID NO: 10417 - DNA, 23 bp, Homo sapiens
taaaagttcgaagagtagtttgg

SEQ ID NO: 10418 - DNA, 23 bp, Homo sapiens
gatactataattatgtaataggg

SEQ ID NO: 10419 - DNA, 23 bp, Homo sapiens
ataaaaacagacatatgtttagg

SEQ ID NO: 10420 - DNA, 23 bp, Homo sapiens
ttaagtagtcatcctagttatgg

SEQ ID NO: 10421 - DNA, 23 bp, Homo sapiens
tctaaactataaactcctatagg

SEQ ID NO: 10422 - DNA, 23 bp, Homo sapiens
agaaacggacagaaatcatttgg

SEQ ID NO: 10423 - DNA, 23 bp, Homo sapiens
ggtaatataatttagttaaaggg

SEQ ID NO: 10424 - DNA, 23 bp, Homo sapiens
aaaggagctattatgatttaggg

SEQ ID NO: 10425 - DNA, 23 bp, Homo sapiens
tctaatgtgctacaacaaaatgg

SEQ ID NO: 10426 - DNA, 23 bp, Homo sapiens
tcttatgtcttattacttgatgg

SEQ ID NO: 10427 - DNA, 23 bp, Homo sapiens
atacatggacgttttccttatgg

SEQ ID NO: 10428 - DNA, 23 bp, Homo sapiens
ataatattgctaactaataatgg

SEQ ID NO: 10429 - DNA, 23 bp, Homo sapiens
cgacatctataatagcaaaaagg

SEQ ID NO: 10430 - DNA, 23 bp, Homo sapiens
gttcttatgtcagcattaattgg

SEQ ID NO: 10431 - DNA, 23 bp, Homo sapiens
ctataagttgattttcaatatgg

SEQ ID NO: 10432 - DNA, 23 bp, Homo sapiens
ggagtacagaggaaccacaccgg

SEQ ID NO: 10433 - DNA, 23 bp, Homo sapiens
aaaatgtagctggagtacagagg

SEQ ID NO: 10434 - DNA, 23 bp, Homo sapiens
ggttactacactatccggtgtgg

SEQ ID NO: 10435 - DNA, 23 bp, Homo sapiens
gaacaaatggagatcaccagagg

SEQ ID NO: 10436 - DNA, 23 bp, Homo sapiens
aaggagataccatactctggagg

SEQ ID NO: 10437 - DNA, 23 bp, Homo sapiens
acatcattttgatataagagggg

SEQ ID NO: 10438 - DNA, 23 bp, Homo sapiens
atagacatggaaaggtgacaagg

SEQ ID NO: 10439 - DNA, 23 bp, Homo sapiens
tgagctatgtgcttttcgcgggg

SEQ ID NO: 10440 - DNA, 23 bp, Homo sapiens
atgggtatgaatgcgtacagtgg

SEQ ID NO: 10441 - DNA, 23 bp, Homo sapiens
aggagacagtcagatcctcatgg

SEQ ID NO: 10442 - DNA, 23 bp, Homo sapiens
ggttgaggaagtcatcctaaggg

SEQ ID NO: 10443 - DNA, 23 bp, Homo sapiens
tcctcatggtaaaagcagcatgg

SEQ ID NO: 10444 - DNA, 23 bp, Homo sapiens
cattttttacaggatacatgtgg

SEQ ID NO: 10445 - DNA, 23 bp, Homo sapiens
gggtgataaggaggtgacaacgg

SEQ ID NO: 10446 - DNA, 23 bp, Homo sapiens
tatgcatgaatgtactgtgtagg

SEQ ID NO: 10447 - DNA, 23 bp, Homo sapiens
atggaaatagttagaaacacggg

SEQ ID NO: 10448 - DNA, 23 bp, Homo sapiens
acatattgaacaaagagccaagg

SEQ ID NO: 10449 - DNA, 23 bp, Homo sapiens
gccatgctgcttttaccatgagg

SEQ ID NO: 10450 - DNA, 23 bp, Homo sapiens
gggtctgagagaaagagtaaggg

SEQ ID NO: 10451 - DNA, 23 bp, Homo sapiens
cctctgattcacaggaaaagcgg

SEQ ID NO: 10452 - DNA, 23 bp, Homo sapiens
acagcgctaattgattgtgtcgg

SEQ ID NO: 10453 - DNA, 23 bp, Homo sapiens
catggaaatagttagaaacacgg

SEQ ID NO: 10454 - DNA, 23 bp, Homo sapiens
tgccactttttaaattacggtgg

SEQ ID NO: 10455 - DNA, 23 bp, Homo sapiens
ttaatacaaaaggcaaggagtgg

SEQ ID NO: 10456 - DNA, 23 bp, Homo sapiens
gatcctttctggactaaaagggg

SEQ ID NO: 10457 - DNA, 23 bp, Homo sapiens
gcttaatattattcatacaaggg

SEQ ID NO: 10458 - DNA, 23 bp, Homo sapiens
atatattaaatattgtctggagg

SEQ ID NO: 10459 - DNA, 23 bp, Homo sapiens
atgagaaactgattagaggatgg

SEQ ID NO: 10460 - DNA, 23 bp, Homo sapiens
tcttatcagatatttgtgaaggg

SEQ ID NO: 10461 - DNA, 23 bp, Homo sapiens
tgtcggtttgcgtaagcatgagg

SEQ ID NO: 10462 - DNA, 23 bp, Homo sapiens
aaatttcctgctaggaacagtgg

SEQ ID NO: 10463 - DNA, 23 bp, Homo sapiens
ggggtaagaactctgatgctggg

SEQ ID NO: 10464 - DNA, 23 bp, Homo sapiens
agaaagttggtatatatccatgg

SEQ ID NO: 10465 - DNA, 23 bp, Homo sapiens
ccgcttttcctgtgaatcagagg

SEQ ID NO: 10466 - DNA, 23 bp, Homo sapiens
agtaacttttgtattaggagagg

SEQ ID NO: 10467 - DNA, 23 bp, Homo sapiens
taaagaataaacagactcaaagg

SEQ ID NO: 10468 - DNA, 23 bp, Homo sapiens
agccaccgtaatttaaaaagtgg

SEQ ID NO: 10469 - DNA, 23 bp, Homo sapiens
ctttccatactctatggcacagg

SEQ ID NO: 10470 - DNA, 23 bp, Homo sapiens
cttttggataaagaataccttgg

SEQ ID NO: 10471 - DNA, 23 bp, Homo sapiens
acacgggtcaacaacaagcttgg

SEQ ID NO: 10472 - DNA, 23 bp, Homo sapiens
tcaaattatcgtaatttgagagg

SEQ ID NO: 10473 - DNA, 23 bp, Homo sapiens
atcaagaccaagatactagcagg

SEQ ID NO: 10474 - DNA, 23 bp, Homo sapiens
gttctgctgagattagtgatagg

SEQ ID NO: 10475 - DNA, 23 bp, Homo sapiens
ttagctcatattctaatgatcgg

SEQ ID NO: 10476 - DNA, 23 bp, Homo sapiens
tggcacaggatgaagtcaaccgg

SEQ ID NO: 10477 - DNA, 23 bp, Homo sapiens
tcaaaccagtgctagaaagttgg

SEQ ID NO: 10478 - DNA, 23 bp, Homo sapiens
ttaccccttttagtccagaaagg

SEQ ID NO: 10479 - DNA, 23 bp, Homo sapiens
ctttctagcactggtttgagagg

SEQ ID NO: 10480 - DNA, 23 bp, Homo sapiens
catggtaaaagcagcatggccgg

SEQ ID NO: 10481 - DNA, 23 bp, Homo sapiens
aggaaaatatttaaaactgatgg

SEQ ID NO: 10482 - DNA, 23 bp, Homo sapiens
tatgagctatgtgcttttcgcgg

SEQ ID NO: 10483 - DNA, 23 bp, Homo sapiens
gggaatgagaaactgattagagg

SEQ ID NO: 10484 - DNA, 23 bp, Homo sapiens
atataccaactttctagcactgg

SEQ ID NO: 10485 - DNA, 23 bp, Homo sapiens
tatatctgaatctcaagaatcgg

SEQ ID NO: 10486 - DNA, 23 bp, Homo sapiens
cacatcattttgatataagaggg

SEQ ID NO: 10487 - DNA, 23 bp, Homo sapiens
ggattattcctctgattcacagg

SEQ ID NO: 10488 - DNA, 23 bp, Homo sapiens
atatttttaaatttcctgctagg

SEQ ID NO: 10489 - DNA, 23 bp, Homo sapiens
tgacgattcaatcgttttggtgg

SEQ ID NO: 10490 - DNA, 23 bp, Homo sapiens
actctttctctcagacccattgg

SEQ ID NO: 10491 - DNA, 23 bp, Homo sapiens
aagagtaaggggtgataaggagg

SEQ ID NO: 10492 - DNA, 23 bp, Homo sapiens
tgacaaggttgatttagaaaagg

SEQ ID NO: 10493 - DNA, 23 bp, Homo sapiens
tagcaggtcccagaagtcattgg

SEQ ID NO: 10494 - DNA, 23 bp, Homo sapiens
ttaaggaatcctcatagaaatgg

SEQ ID NO: 10495 - DNA, 23 bp, Homo sapiens
ttgcatactgtaaaaaagaatgg

SEQ ID NO: 10496 - DNA, 23 bp, Homo sapiens
cctattgattatgctccaaatgg

SEQ ID NO: 10497 - DNA, 23 bp, Homo sapiens
acataatttagagcattaatggg

SEQ ID NO: 10498 - DNA, 23 bp, Homo sapiens
gataataacacttttaaaaaggg

SEQ ID NO: 10499 - DNA, 23 bp, Homo sapiens
tctcaaattacgataatttgagg

SEQ ID NO: 10500 - DNA, 23 bp, Homo sapiens
ggatggactaaaacgtttccagg

SEQ ID NO: 10501 - DNA, 23 bp, Homo sapiens
ccatttggagcataatcaatagg

SEQ ID NO: 10502 - DNA, 23 bp, Homo sapiens
gcacatcattttgatataagagg

SEQ ID NO: 10503 - DNA, 23 bp, Homo sapiens
ttagagagccttatcagaattgg

SEQ ID NO: 10504 - DNA, 23 bp, Homo sapiens
ttagttggtcctccagagtatgg

SEQ ID NO: 10505 - DNA, 23 bp, Homo sapiens
tcatcctgtgccatagagtatgg

SEQ ID NO: 10506 - DNA, 23 bp, Homo sapiens
attaaagacgtttagcaaaatgg

SEQ ID NO: 10507 - DNA, 23 bp, Homo sapiens
cattttctctttcttctaatggg

SEQ ID NO: 10508 - RNA, 282 nt, Homo sapiens
gugcauggacauccuggagcugucggagcgccuggaccugcagcgcuuccacucgcacacccugcgccucuaccgcgcugugugcgcccugggcaacaaucgcguggcgcacgcucugugcagccacguagaccaagcucagcugcugcacgcccuggaggacgcgcaccugccaggcccacugcgcgcaggcuacuaugaccuccucaucagcauccaccucgaaagugccugccgcagccgccgcuccaugcucucugaauacaucgugccccucacgcc

SEQ ID NO: 10509 - protein, 94 aa, Homo sapiens
CMDILELSERLDLQRFHSHTLRLYRAVCALGNNRVAHALCSHVDQAQLLHALEDAHLPGPLRAGYYDLLISIHLESACRSRRSMLSEYIVPLTP

SEQ ID NO: 10510 - DNA, 197 bp, Homo sapiens
gacgcccacctttggcctcctcccactatccaggtgcccctggtaatctttaagcgggagaaggagctggcccggaagctggagtttgatggcctgtacatcacggagcagcctgaggacgatgacgtgaaggggcagtgggaccgactggtgctcaacacgccgtaaggacccagcccccacctcagggtggcagc

SEQ ID NO: 10511 - protein, 43 aa, Homo sapiens
VPLVIFKREKELARKLEFDGLYITEQPEDDDVKGQWDRLVLNT

SEQ ID NO: 10512 - DNA, 109 bp, Artificial Sequence
  Description of Artificial Sequence: Synthetic polynucleotide
agtataaaatacagagctaagacaagaacgtttcattggctttgatttccagttcttaggcaactgtttctctctcagcaaacacattactctcactattcagcctaag

SEQ ID NO: 10513 - DNA, 109 bp, Artificial Sequence
  Description of Artificial Sequence: Synthetic polynucleotide
agtataaaatacagagctaagacaagaacgtttcattggctttgatttccagttcttaggcaactgtttctctctcaacaaacacattactctcactattcagcctaag

SEQ ID NO: 10514 - DNA, 75 bp, Mus sp.
gaacatatgaataaacttcgaaaatttcaggtaagccgaggtttggcctttaaactatattttttcacatagcaa

SEQ ID NO: 10515 - DNA, 62 bp, Artificial Sequence
  Description of Artificial Sequence: Synthetic oligonucleotide
gaacatatgaatatcaggtaagccgaggtttggcctttaaactatattttttcacatagcaa

SEQ ID NO: 10516 - DNA, 49 bp, Artificial Sequence
  Description of Artificial Sequence: Synthetic oligonucleotide
gaacatatgaataggtttggcctttaaactatattttttcacatagcaa

SEQ ID NO: 10517 - DNA, 75 bp, Artificial Sequence
  Description of Artificial Sequence: Synthetic oligonucleotide
  modified_base (26)..(29): a, c, t, g, unknown or other
gaacatatgaataaacttcgaaaatnnnnttcaggtaagccgaggtttggcctttaaactatattttttcacata

SEQ ID NO: 10518 - DNA, 48 bp, Artificial Sequence
  Description of Artificial Sequence: Synthetic oligonucleotide
gaacatatgaatagtttggcctttaaactatattttttcacatagcaa

SEQ ID NO: 10519 - DNA, 75 bp, Artificial Sequence
  Description of Artificial Sequence: Synthetic oligonucleotide
  modified_base (26)..(32): a, c, t, g, unknown or other
gaacatatgaataaacttcgaaaatnnnnnnnttcaggtaagccgaggtttggcctttaaactatattttttcac

SEQ ID NO: 10520 - DNA, 50 bp, Artificial Sequence
  Description of Artificial Sequence: Synthetic oligonucleotide
gaacatatgaataaggtttggcctttaaactatattttttcacatagcaa

SEQ ID NO: 10521 - DNA, 74 bp, Artificial Sequence
  Description of Artificial Sequence: Synthetic oligonucleotide
gaacatatgaataaacttcgaaaattcaggtaagccgaggtttggcctttaaactatattttttcacatagcaa

SEQ ID NO: 10522 - DNA, 75 bp, Artificial Sequence
  Description of Artificial Sequence: Synthetic oligonucleotide
  modified_base (26)..(36): a, c, t, g, unknown or other
gaacatatgaataaacttcgaaaatnnnnnnnnnnnttcaggtaagccgaggtttggcctttaaactatattttt

SEQ ID NO: 10523 - DNA, 75 bp, Artificial Sequence
  Description of Artificial Sequence: Synthetic oligonucleotide
  modified_base (26)..(31): a, c, t, g, unknown or other
gaacatatgaataaacttcgaaaatnnnnnnttcaggtaagccgaggtttggcctttaaactatattttttcaca

SEQ ID NO: 10524 - DNA, 57 bp, Artificial Sequence
  Description of Artificial Sequence: Synthetic oligonucleotide
gaacatatgaatataagccgaggtttggcctttaaactatattttttcacatagcaa

SEQ ID NO: 10525 - DNA, 60 bp, Artificial Sequence
  Description of Artificial Sequence: Synthetic oligonucleotide
gaacatatgaataaacttcgacgaggtttggcctttaaactatattttttcacatagcaa

SEQ ID NO: 10526 - DNA, 75 bp, Artificial Sequence
  Description of Artificial Sequence: Synthetic oligonucleotide
  modified_base (26)..(30): a, c, t, g, unknown or other
gaacatatgaataaacttcgaaaatnnnnnttcaggtaagccgaggtttggcctttaaactatattttttcacat

SEQ ID NO: 10527 - DNA, 70 bp, Artificial Sequence
  Description of Artificial Sequence: Synthetic oligonucleotide
gaacatatgaataaacttcgatcaggtaagccgaggtttggcctttaaactatattttttcacatagcaa

SEQ ID NO: 10528 - DNA, 51 bp, Artificial Sequence
  Description of Artificial Sequence: Synthetic oligonucleotide
gaacatatgaatagaggtttggcctttaaactatattttttcacatagcaa

SEQ ID NO: 10529 - DNA, 75 bp, Artificial Sequence
  Description of Artificial Sequence: Synthetic oligonucleotide
  modified_base (26)..(39): a, c, t, g, unknown or other
gaacatatgaataaacttcgaaaatnnnnnnnnnnnnnnttcaggtaagccgaggtttggcctttaaactatatt

SEQ ID NO: 10530 - DNA, 68 bp, Artificial Sequence
  Description of Artificial Sequence: Synthetic oligonucleotide
gaacatatgaataaacttttcaggtaagccgaggtttggcctttaaactatattttttcacatagcaa

SEQ ID NO: 10531 - DNA, 46 bp, Artificial Sequence
  Description of Artificial Sequence: Synthetic oligonucleotide
gaacatatgaagtttggcctttaaactatattttttcacatagcaa

SEQ ID NO: 10532 - DNA, 75 bp, Artificial Sequence
  Description of Artificial Sequence: Synthetic oligonucleotide
  modified_base (26)..(35): a, c, t, g, unknown or other
gaacatatgaataaacttcgaaaatnnnnnnnnnnttcaggtaagccgaggtttggcctttaaactatatttttt

SEQ ID NO: 10533 - DNA, 60 bp, Artificial Sequence
  Description of Artificial Sequence: Synthetic oligonucleotide
gaacatatgaataaggtaagccgaggtttggcctttaaactatattttttcacatagcaa

SEQ ID NO: 10534 - DNA, 75 bp, Mus sp.; identical to SEQ ID NO: 10514

SEQ ID NO: 10535 - DNA, 75 bp, Artificial Sequence; identical to SEQ ID NO: 10526
  Description of Artificial Sequence: Synthetic oligonucleotide
  modified_base (26)..(30): a, c, t, g, unknown or other

SEQ ID NO: 10536 - DNA, 57 bp, Artificial Sequence
  Description of Artificial Sequence: Synthetic oligonucleotide
gaacatatgaataaacttcgaggtttggcctttaaactatattttttcacatagcaa

SEQ ID NO: 10537 - DNA, 49 bp, Artificial Sequence
  Description of Artificial Sequence: Synthetic oligonucleotide
gaacatatgaagaggtttggcctttaaactatattttttcacatagcaa

SEQ ID NO: 10538 - DNA, 71 bp, Artificial Sequence
  Description of Artificial Sequence: Synthetic oligonucleotide
gaacatatgaataaacttcgattcaggtaagccgaggtttggcctttaaactatattttttcacatagcaa

SEQ ID NO: 10539 - DNA, 54 bp, Artificial Sequence
  Description of Artificial Sequence: Synthetic oligonucleotide
gaacatatgaaaagccgaggtttggcctttaaactatattttttcacatagcaa

SEQ ID NO: 10540 - DNA, 68 bp, Artificial Sequence
  Description of Artificial Sequence: Synthetic oligonucleotide
gaacatatgaataaacttcgaaggtaagccgaggtttggcctttaaactatattttttcacatagcaa

SEQ ID NO: 10541 - DNA, 61 bp, Artificial Sequence
  Description of Artificial Sequence: Synthetic oligonucleotide
gaacatatgaattcaggtaagccgaggtttggcctttaaactatattttttcacatagcaa

SEQ ID NO: 10542 - DNA, 58 bp, Artificial Sequence
  Description of Artificial Sequence: Synthetic oligonucleotide
gaacatatgaaaggtaagccgaggtttggcctttaaactatattttttcacatagcaa

SEQ ID NO: 10543 - DNA, 51 bp, Artificial Sequence; identical to SEQ ID NO: 10528
  Description of Artificial Sequence: Synthetic oligonucleotide

SEQ ID NO: 10544 - DNA, 57 bp, Artificial Sequence
  Description of Artificial Sequence: Synthetic oligonucleotide
gaacatatgaatgtaagccgaggtttggcctttaaactatattttttcacatagcaa

SEQ ID NO: 10545 - DNA, 66 bp, Artificial Sequence
  Description of Artificial Sequence: Synthetic oligonucleotide
gaacatatgaataaacttcaggtaagccgaggtttggcctttaaactatattttttcacatagcaa

SEQ ID NO: 10546 - DNA, 57 bp, Artificial Sequence
  Description of Artificial Sequence: Synthetic oligonucleotide
gaacatatgaaggtaagccgaggtttggcctttaaactatattttttcacatagcaa

SEQ ID NO: 10547 - DNA, 75 bp, Artificial Sequence
  Description of Artificial Sequence: Synthetic oligonucleotide
  modified_base (26)..(28): a, c, t, g, unknown or other
gaacatatgaataaacttcgaaaatnnnttcaggtaagccgaggtttggcctttaaactatattttttcacatag

SEQ ID NO: 10548 - DNA, 75 bp, Mus sp.; identical to SEQ ID NO: 10514

SEQ ID NO: 10549 - DNA, 72 bp, Artificial Sequence
  Description of Artificial Sequence: Synthetic oligonucleotide
gaacatatgaataaacttcgaattcaggtaagccgaggtttggcctttaaactatattttttcacatagcaa

SEQ ID NO: 10550 - DNA, 48 bp, Artificial Sequence; identical to SEQ ID NO: 10518
  Description of Artificial Sequence: Synthetic oligonucleotide

SEQ ID NO: 10551 - DNA, 75 bp, Artificial Sequence; identical to SEQ ID NO: 10519
  Description of Artificial Sequence: Synthetic oligonucleotide
  modified_base (26)..(32): a, c, t, g, unknown or other

SEQ ID NO: 10552 - DNA, 75 bp, Artificial Sequence; identical to SEQ ID NO: 10532
  Description of Artificial Sequence: Synthetic oligonucleotide
  modified_base (26)..(35): a, c, t, g, unknown or other

SEQ ID NO: 10553 - DNA, 57 bp, Artificial Sequence; identical to SEQ ID NO: 10524
  Description of Artificial Sequence: Synthetic oligonucleotide

SEQ ID NO: 10554 - DNA, 75 bp, Artificial Sequence; identical to SEQ ID NO: 10517
  Description of Artificial Sequence: Synthetic oligonucleotide
  modified_base (26)..(29): a, c, t, g, unknown or other

SEQ ID NO: 10555 - DNA, 46 bp, Artificial Sequence; identical to SEQ ID NO: 10531
  Description of Artificial Sequence: Synthetic oligonucleotide

SEQ ID NO: 10556 - DNA, 45 bp, Artificial Sequence
  Description of Artificial Sequence: Synthetic oligonucleotide
gaacatatgagtttggcctttaaactatattttttcacatagcaa

SEQ ID NO: 10557 - DNA, 70 bp, Artificial Sequence
  Description of Artificial Sequence: Synthetic oligonucleotide
gaacatatgaataaacttcgaaaatgtaagccgaggtttggcctttaaactatattttttcacatagcaa

SEQ ID NO: 10558 - DNA, 59 bp, Artificial Sequence
  Description of Artificial Sequence: Synthetic oligonucleotide
gaacatatgaataggtaagccgaggtttggcctttaaactatattttttcacatagcaa
